(19) United States
(12) Patent Application Publication
(10) Pub. No.: US 2018/0245073 A1
(43) Pub. Date: Aug. 30, 2018

(54) REGULATABLE EXPRESSION USING ADENO-ASSOCIATED VIRUS (AAV)

(71) Applicant: VOYAGER THERAPEUTICS, INC., CAMBRIDGE, MA (US)

(72) Inventors: Robert Kotin, Boston, MA (US); James McLaughlin, Cambridge, MA (US); Jinzhao Hou, Belmont, MA (US)

(21) Appl. No.: 15/553,021

(22) PCT Filed: Feb. 23, 2016
(86) PCT No.: PCT/US2016/019066

§ 371 Date: Aug. 23, 2017

Related U.S. Application Data
(60) Provisional application No. 62/119,416, filed on Feb. 23, 2015.
(60) Provisional application No. 62/199,399, filed on Jul. 31, 2015.

(51) Int. Cl. C12N 15/11; C12N 9/22

(52) U.S. Cl. CPC C12N 15/11; C12N 2310/20; C12N 2750/14142; C12N 9/22

(57) ABSTRACT

The present invention relates to CRISPR-AAV vectors and viral particles which exhibit self-regulatory or regulatable features.

### CROSS REFERENCE TO RELATED APPLICATIONS

[0001] This application claims the benefit of U.S. Provisional Patent Application No. 62/119,416, entitled Regulatable Expression Using Adeno-Associated Virus (AAV), filed Feb. 23, 2015, and U.S. Provisional Patent Application No. 62/199,399, entitled Regulatable Expression Using Adeno-Associated Virus (AAV), filed Jul. 31, 2015, the contents of each of which are herein incorporated by reference in their entirety.

### REFERENCE TO THE SEQUENCE LISTING

[0002] The present application is being filed along with a Sequence Listing in electronic format. The Sequence Listing file, entitled 1501PCTSEQLST.txt, was created on Feb. 22, 2016 and is 2,281,497 bytes in size. The information in electronic format of the Sequence Listing is incorporated herein by reference in its entirety.

### FIELD OF THE INVENTION

[0003] The present invention relates to compositions, methods and processes for the design, preparation, manufacture and/or formulation of recombinant parvovirus, e.g. adeno-associated virus (AAV), particles having one or more CRISPR regulatable expression elements and methods of using the same.

### BACKGROUND OF THE INVENTION

[0004] First identified in 1987, the CRISPR (Clustered Regularly Interspersed Short Palindromic Repeats) system functions as an adaptive immune response defense in the genomes of several bacteria and Archaea.

[0005] In bacteria, CRISPR, along with CRISPR-associated or cas genes, function in association with non-coding RNAs to recognize and destroy foreign DNA and to ensure survival against subsequent invasions by a similar pathogen, whether a virus or plasmid. Three types of CRISPR systems have been identified in bacteria with the Type II system being the most widely explored.

[0006] The Type II natural RNA-guided DNA nuclease system includes the Cas9 nuclease (also known as Csn1 and formerly known as Cas5) and two small RNAs known as “crRNA” or CRISPR RNA and “tracrRNA” or trans-activating CRISPR RNA. Both are processed from the clustered repeats encoded in the bacterial host genome. The type II CRISPR system requires both the crRNA and the tracrRNA to be functional. In this system, the crRNA associates with the cas9 endonuclease and acts as a hybridization strand providing localization to the complementary target DNA while the tracrRNA associates with the crRNA through partial hybridization and has been shown to be necessary for Cas9 complex binding to the target dsDNA. Once associated with the target dsDNA site, the cas9 enzyme cleaves both strands of the dsDNA thereby destroying the invading organism.

[0007] The Type II system is exemplified by the systems found in Streptococcus pyogens and Streptococcus thermophilus. Here the effector complex involves a single Cas9 protein. Early studies of CRISPR-dependent immunity in Streptococcus thermophilus were performed by Barrangou and colleagues (Barrangou et al., Science; 2007; 315:1709-12; Horvath and Barrangou, Science, 2010; 327:167-170). In the S. thermophilus strain, the tracrRNA of approximately 65 nucleotides co-purifies with the Cas9 protein and a 42 nucleotide crRNA (Karvelis et al., RNA Biology, 2013; 10:5: 841-851). Sapranauskas et al. demonstrated the transfer of the S. thermophilus CRISPR3/Cas system into E. coli and that this transfer could provide protection against plasmid transformation. It was also shown that the protection was sequence specific (NAR, 2011; 39(21): 9275-9282).

[0008] Studies of the maturation process of the crRNA and tracrRNA in S. pyogens illustrated the necessity of the tracrRNA for maturation of the functional complex and the involvement of an RNase III (Deltcheva, et al., Nature, 2011; 471:602-607). The work of Deltcheva et al. led to the work of Jinek, et al. (Science, 2012; 337:816-821) showing that the crRNA and tracrRNA could be combined into one chimeric RNA molecule to produce a functional ribonucleoprotein complex which could cleave a plasmid or oligonucleotide duplex bearing the required protospacer and PAM. Jinek et al. showed that each Cas9 domain cleaved only one strand of the dsDNA duplex and that point mutations in conserved catalytic amino acids of the two domains (D10A and H840A) resulted in the determination that the HNH domain (mutation H840A) cleaves the strand complementary to the crRNA (or template strand) while the RuvC-like domain (mutation D10A) cleaves the non-complementary or displaced strand (or non-template strand) which comprises the protospacer.

[0009] It has since been discovered that Type II CRISPR nuclease-guided cleavage of dsDNA can be reprogrammed to work in higher organism by providing a Cas9 enzyme and altering the features of the two small RNAs associated with the Cas enzyme. In higher organisms such as in mammalian cells, targeting and cleavage of the endogenous or genomic dsDNA triggers the cell's natural repair mechanisms through either non-homologous end joining (NHEJ) or homology directed repair (HDR) pathways, thereby editing the target genomic site.

[0010] This observation inspired a series of studies exploring the requirements of tracrRNA size, DNA binding and hybridization, mutant Cas9 enzymes, delivery of the enzyme and RNA molecules to mammalian cells, localization to the nucleus, off-target effects, the specificity of genome editing and multiplexing target sites (Karvelis et al., RNA Biology, 2013; 10:5; 841-851; Gasiunas et al., PNAS, USA 2012; 109:E2579-E2586; Cong et al., Science, 2013; 339: 819-823; Mali, et al., Science; 2013; 339: 823-826; Hwang et al., Nat. Biotechnol., 2013; doi 10.1038/nbt.2501; Cho et al., Nat. Biotechnol., 2013; doi 10.1038/nbt.2507; Jiang et al., Nat. Biotechnol., 2013; 31; 233-241; Fu et al., Nat. Biotechnol. 2013; doi: 10.1038/nbt2623; and Chylinski et al., RNA Biology; 2013; 10:5; 726-737).

[0011] The use of the Cas9 CRISPR system in mice has been studied by Shen and Wang et al., (Cell, 2013; 153:910-918). Shen et al. targeted a GFP transgene in the mouse genome by administering a Cas9 mRNA and pre-annealed crRNA-tracrRNA chimera to mouse embryos. They showed site specific cleavage in a chromosomal locus. Wang et al. explored triggering homologous recombination in the mouse and utilized a Cas9 mRNA and chimeric crRNA-tracrRNA. In these studies, conversion of an EcoRV site to an EcoRI restriction sites was successful upon a two base pair insertion. Still neither group demonstrated insertion of a larger polynucleotide.

[0012] Cleavage deficient Cas9 enzymes of Streptococcus pyogens and S. thermophilus have been explored further by Sapranauskas et al., (NAR, 2011; 39(21); 9275-9282), Qi et al., (Cell, 2013; 152:1173-1183) and Bikard et al., (NAR, 2013; 1-9) where the effects on transcription modulation including upregulation and silencing were investigated.

[0013] Studies in organisms other than bacteria include those in yeast (DiCarlo et al., NAR; 2013; 41:4336-4343), Drosophila (Gratz; Yu et al., Genetics, 2013; doi10.1534/genetics.113.153825) and Zebrafish (Hwang et al., Nat. Biotechnol. Doi 10.1038/nbt.2501).

[0014] On this background there remains, however, much work to be done to define the optimized components of a system which will be effective in exploiting the cas9 CRISPR system as a tool for research, diagnostics and therapeutics with the ultimate goal of target-specific genome editing.

[0015] And while other genome editing technologies such as zinc finger (ZFNs), transcription activator-like effector nucleases (TALENs) and homing meganuclease have recently been utilized to edit DNA in hopes of repairing genomic defect, these suffer from lack of scalability, difficulty in individualized engineering and the expense of designing a unique complex for each locus to be altered.

[0016] The present invention addresses the need for new technologies for treating genetic disorders caused by abnormalities in the genome whether heritable or acquired, monogenic or multifactorial, by providing AAV-based compositions and complexes which go beyond those of the art.

[0017] The present invention provides recombinant adeno-associated virus particles having at least one CRISPR regulatable element. These elements when used in association with AAV technology allow, for the first time, the regulatable tuning of payload expression from a viral genome delivered by an AAV particle and consequently the ability to produce gene editing events at discrete loci while being able to control or limit the duration of the constitutive nature of payload expression from an AAV viral genome.

[0018] While exemplified in the AAV system, polynucleotides, vectors, and/or particles of the invention include, but are not limited to vector genomes of any of the AAV serotypes or other parvoviral viral delivery vehicles or lentivirus, etc.

### SUMMARY OF THE INVENTION

[0019] The present invention provides CRISPR-AAV vectors and viral particles for the regulatable expression of genes. Such regulation can be the inhibition of gene expression, gene replacement or gene activation. Such outcomes are achieved by utilizing CRISPR regulatable elements encoded in the polynucleotide of the AAV particles in such a manner as to tune or control the level or degree of expression of the payload (whether a polynucleotide useful for gene knockdown or for gene replacement, activation, or inhibition) encoded by the AAV viral genome.

[0020] Manufacture of such particles is performed in insect cells, e.g., sf9 cells and utilize a heterologous promoter such that the autocatalytic features of the polynucleotide will not result in self destruction of the molecule as manufactured.

[0021] In one embodiment the present invention is a composition comprising an AAV particle comprising a polynucleotide encoding at least one payload and at least one CRISPR regulatable element.

[0022] In another embodiment the present invention is a method of synthesizing a CRISPR-AAV particle comprising a) introducing into competent bacterial cells i) a payload construct vector comprising a payload and one or more CRISPR regulatable elements flanked on each side by a parvoviral ITR sequence to produce a payload construct expression vector; and ii) one or more viral construct vector(s) comprising parvoviral rep and/or cap gene sequences under the control of one or more regulatory elements to produce a viral construct expression vector; b) introducing into viral replication cells i) the payload construct expression vector produced in step (a.i) to produce a payload construct particle; and ii) the viral construct expression vector(s) produced in step (a.ii) to produce a viral construct particle; and c) co-infecting a viral replication cell with the payload construct viral particle produced in step (b.i) and the one or more viral construct viral particle(s) of step (b.ii) to produce a CRISPR-AAV particle.

[0023] In another embodiment the present invention is a CRISPR-AAV particle comprising an AAV polynucleotide, the AAV polynucleotide comprising: (a) at least one payload, and (b) at least one CRISPR regulatable element

[0024] In another embodiment the present invention is a method of treating a CNS disorder in a subject in need thereof, the method comprising administering to the subject a therapeutically effective amount of a CRISPR-AAV particle comprising an AAV polynucleotide, the AAV polynucleotide comprising: (a) at least one payload, and (b) at least one CRISPR regulatable element.

[0025] In one embodiment, provided are methods of regulating the expression of a protein of interest using a CRISPR AAV particle comprising an AAV polynucleotide.

[0026] In one aspect, the AAV polynucleotide may have at least one payload and at least one CRISPR regulatable element such as, but not limited to, a DNA binding domain which may be coupled with a transactivation domain. The regulatable element may be located in the VP2 capsid and may increase the expression of a protein of interest in a burst like fashion. The increase may be for at least 2 hours or may be for at least 6 hours.

[0027] In another aspect, the AAV polynucleotide may have at least one payload and at least one CRISPR regulatable element such as, but not limited to, a cas9 endonuclease fused to a destabilizing domain. The destabilizing domain may be a destabilizing domain from a protein family such as, but not limited to, FK506 Binding Protein (FKBP), E. coli dihyrofolate reductase (DHFR), mouse ornithine decarboxylase (MODC), and estrogen receptors (ER). As a non-limiting example, the destabilizing domain is from an estrogen receptor protein.

### DETAILED DESCRIPTION OF THE INVENTION

[0028] The present invention relates to compositions, methods and processes for the design, preparation, manufacture and/or formulation of recombinant adeno-associated virus (AAV) particles having one or more CRISPR regulatable expression elements and methods of using the same.

[0029] The details of one or more embodiments of the invention are set forth in the accompanying description below. Although any materials and methods similar or equivalent to those described herein can be used in the practice or testing of the present invention, the preferred materials and methods are now described. Other features, objects and advantages of the invention will be apparent from the description. In the description, the singular forms also include the plural unless the context clearly dictates otherwise. Unless defined otherwise, all technical and scientific terms used herein have the same meaning as commonly understood by one of ordinary skill in the art to which this invention belongs. In the case of conflict, the present description will control.

[0030] Viruses of the Parvoviridae family are small non-enveloped icosahedral capsid viruses characterized by a single stranded DNA genome. Parvoviridae family viruses consist of two subfamilies: Parvovirinae, which infect vertebrates, and Densovirinae, which infect invertebrates. This virus family is used as biological tools due to a relatively simple structure that may be easily manipulated with standard molecular biology techniques. The genome of the virus may be modified to contain a minimum of components for the assembly of a functional recombinant virus, or viral particle, which is loaded with or engineered to express or deliver a desired nucleic acid construct or payload, e.g., a transgene, polypeptide-encoding polynucleotide or modulatory nucleic acid, which may be delivered to a target cell, tissue or organism.

[0031] The parvoviruses and other members of the Parvoviridae family are generally described in Kenneth I. Berns, “Parvoviridae: The Viruses and Their Replication,” Chapter 69 in FIELDS VIROLOGY (3d Ed. 1996), the contents of which is incorporated by reference in its entirety.

[0032] The Parvoviridae family comprises the Dependovirus genus which includes adeno-associated viruses (AAV) capable of replication in vertebrate hosts including, but not limited to, human, primate, bovine, canine, equine, and ovine species.

[0033] Described herein are compositions, methods, processes, kits and devices for the design, preparation, manufacture and/or formulation of AAV particles for altering the genomic state or status of a cell, tissue, organ or organism, herein referred to as “regulatable AAV expression particles.” Such AAV particles comprise one or more CRISPR regulatable expression elements and hence are termed “CRISPR-AAV” particles. As used herein, a “CRISPR regulatable expression element” includes any component of a CRISPR system including but not limited to a Cas9,Cas9 related nucleases, or Cas9-fusion proteins, one or more sgRNA (small guide RNAs), one or more tracrRNAs and/or other polynucleotide feature or motif which imparts regulatable or tunable features to an AAV viral genome encoding them.

[0034] Where an AAV polynucleotide encodes one or more CRISPR regulatable expression elements e.g., CRISPR regulatable elements, it is termed herein a “CRISPR-AAV” polynucleotide. CRISPR-AAV polynucleotides may be designed for gene knockdown or for gene replacement (resulting in e.g., activation, initiation, and increased expression).

[0035] In some embodiments, the cas9 protein or nuclease is the CRISPR regulatable element and may be selected from any of the known or putative Streptococcus cas9 enzymes in the Uniprot cluster and listed in Table 1. Such proteins, if they are to be delivered as a nucleic acid such as an encoded mRNA and expressed in an organism other than Streptococcus, may be codon optimized for expression in the recipient cell or organism.

TABLE 1
Cas 9 proteins of Streptococcus sp.

| Uniprot | | | SEQ ID |
|---|---|---|---|
| Entry | Protein name | Organism | NO |
| Q03JI6 | CRISPR-associated endonuclease Cas9 | Streptococcus thermophilus (strain | 1 |
| | 2 (EC 3.1.—.—) | ATCC BAA-491/LMD-9) | |
| Q99ZW2 | CRISPR-associated endonuclease | Streptococcus pyogenes serotype M1 | 2 |
| | Cas9/Csn1 (EC 3.1.—.—) | | |
| G3ECR1 | CRISPR-associated endonuclease Cas9 | Streptococcus thermophilus | 3 |
| | (EC 3.1.—.—) | | |
| J3JPT0 | CRISPR-associated protein csn1 | Streptococcus ratti FA-1 = DSM 20564 | 4 |
| | (Uncharacterized protein) | | |
| I5BLK7 | Uncharacterized protein | Streptococcus agalactiae ZQ0910 | 5 |
| K4Q9P5 | Uncharacterized protein | Streptococcus dysgalactiae subsp. | 6 |
| | | equisimilis AC-2713 | |
| Q3D2H4 | Reticulocyte binding protein | Streptococcus agalactiae H36B | 7 |
| M2GS30 | Uncharacterized protein | Streptococcus mutans A19 | 8 |
| Q3DG33 | Reticulocyte binding protein | Streptococcus agalactiae CJB111 | 9 |
| M1YDU0 | Uncharacterized protein | Streptococcus agalactiae LADL-90-503 | 10 |
| M7DS80 | Uncharacterized protein | Streptococcus mutans ATCC 25175 | 11 |
| M7DAQ6 | Uncharacterized protein | Streptococcus mutans KK23 | 12 |
| M2KYB4 | Uncharacterized protein | Streptococcus mutans S1B | 13 |
| I0Q2W2 | CRISPR-associated protein Cas9/Csn1, | Streptococcus oralis SK610 | 14 |
| | subtype II/NMEMI | | |
| Q3DN68 | Reticulocyte binding protein | Streptococcus agalactiae 515 | 15 |
| E9FPR9 | CRISPR-associated protein, Csn1 | Streptococcus sp. M334 | 16 |
| | family | | |
| F5U0T2 | CRISPR-associated protein, Csn1 | Streptococcus anginosus SK52 = DSM | 17 |
| | family | 20563 | |
| H8HE09 | CRISPR-associated protein Csn1 | Streptococcus pyogenes MGAS1882 | 18 |
| M2E8A3 | Uncharacterized protein | Streptococcus mutans 8ID3 | 19 |
| Q3DAP7 | Reticulocyte binding protein | Streptococcus agalactiae COH1 | 20 |
| J7TMY5 | Putative cytosolic protein | Streptococcus salivarius K12 | 21 |
| F2C4I5 | Csn1 family CRISPR-associated protein | Streptococcus sanguinis SK330 | 22 |
| F9HIG7 | CRISPR-associated protein Cas9/Csn1, | Streptococcus sp. oral taxon 056 str. | 23 |
| | subtype II/NMEMI | F0418 | |
| E0PL18 | Csn1 family CRISPR-associated protein | Streptococcus gallolyticus subsp. | 24 |
| | | gallolyticus TX20005 | |
| M4YX12 | CRISPR-associated protein | Streptococcus dysgalactiae subsp. | 25 |
| | | equisimilis RE378 | |
| M1XVB4 | Uncharacterized protein | Streptococcus agalactiae SS1219 | 26 |
| M7E3Z6 | CRISPR-associated protein csn1 | Streptococcus mutans NCTC 11060 | 27 |
| M2ECS5 | Uncharacterized protein | Streptococcus mutans 4SM1 | 28 |
| F0I6Z8 | Csn1 family CRISPR-associated protein | Streptococcus sanguinis SK115 | 29 |
| M2FSD0 | Uncharacterized protein | Streptococcus mutans 2VS1 | 30 |
| J7M7J1 | Uncharacterized protein | Streptococcus pyogenes M1 476 | 31 |
| M2LXP5 | Uncharacterized protein | Streptococcus mutans U2B | 32 |
| M2IJW5 | Uncharacterized protein | Streptococcus mutans M2A | 33 |
| M2KKV5 | Uncharacterized protein | Streptococcus mutans 66-2A | 34 |
| M2IIP5 | Uncharacterized protein | Streptococcus mutans NLML9 | 35 |
| M2DYK8 | Uncharacterized protein | Streptococcus mutans 4VF1 | 36 |
| M2HBR4 | Uncharacterized protein | Streptococcus mutans N66 | 37 |
| G5KAN2 | CRISPR-associated protein Cas9/Csn1, | Streptococcus pseudoporcinus LQ 940- | 38 |
| | subtype II/NMEMI | 04 | |
| M2F746 | Uncharacterized protein | Streptococcus mutans 11VS1 | 39 |
| M2KCP8 | Uncharacterized protein | Streptococcus mutans SA38 | 40 |
| K4N5K1 | CRISPR-associated protein, Csn1 | Streptococcus pyogenes A20 | 41 |
| | family | | |
| M2G9R5 | Uncharacterized protein | Streptococcus mutans A9 | 42 |
| M2KJE3 | Uncharacterized protein | Streptococcus mutans SM4 | 43 |
| M7CZ76 | Uncharacterized protein | Streptococcus mutans KK21 | 44 |
| M2FYT7 | Uncharacterized protein | Streptococcus mutans M21 | 45 |
| F5U4D7 | CRISPR-associated protein, Csn1 | Streptococcus dysgalactiae subsp. | 46 |
| | family (Fragment) | equisimilis SK1249 | |
| F5U5Q4 | Putative uncharacterized protein | Streptococcus dysgalactiae subsp. | 47 |
| | (Fragment) | equisimilis SK1249 | |
| M2H646 | Uncharacterized protein | Streptococcus mutans U138 | 48 |
| M2KHB4 | Uncharacterized protein | Streptococcus mutans SM1 | 49 |
| M2J4V9 | Uncharacterized protein | Streptococcus mutans ST6 | 50 |
| M2F2U6 | Uncharacterized protein | Streptococcus mutans 11SSST2 | 51 |
| G7SP82 | CRISPR-system-like protein | Streptococcus suis ST1 | 52 |
| M2FXA5 | Uncharacterized protein | Streptococcus mutans G123 | 53 |
| M2IJB5 | Uncharacterized protein | Streptococcus mutans NV1996 | 54 |
| M7E6C3 | Uncharacterized protein | Streptococcus mutans AC4446 | 55 |
| K1LK43 | Csn1 family CRISPR-associated protein | Streptococcus iniae 9117 | 56 |
| I0SF74 | CRISPR-associated protein Cas9/Csn1, | Streptococcus constellatus subsp. | 57 |
| | subtype II/NMEMI | constellatus SK53 | |
| M1YIE1 | Uncharacterized protein | Streptococcus agalactiae CF01173 | 58 |
| M2J1X3 | Uncharacterized protein | Streptococcus mutans W6 | 59 |
| I6SW88 | CRISPR-associated protein csn1 | Streptococcus mutans GS-5 | 60 |
| I6Q294 | Csn1 | Streptococcus thermophilus MN-ZLW- | 61 |
| | | 002 | |
| F0FD37 | Csn1 family CRISPR-associated protein | Streptococcus sanguinis SK353 | 62 |
| F9NIK9 | CRISPR-associated protein Cas9/Csn1, | Streptococcus dysgalactiae subsp. | 63 |
| | subtype II/NMEMI | equisimilis SK1250 | |
| F9NIK8 | Putative uncharacterized protein | Streptococcus dysgalactiae subsp. | 64 |
| | | equisimilis SK1250 | |
| M2JCP4 | Uncharacterized protein | Streptococcus mutans B | 65 |
| K4PPI8 | CRISPR-associated protein | Streptococcus agalactiae SA20-06 | 66 |
| E1LI65 | HNH endonuclease family protein | Streptococcus mitis SK321 | 67 |
| E9FJ16 | CRISPR-associated protein, Csn1 | Streptococcus sp. C300 | 68 |
| | family | | |
| M2KGB0 | Uncharacterized protein | Streptococcus mutans 14D | 69 |
| M7DIF2 | CRISPR-associated protein csn1 | Streptococcus mutans 5DC8 | 70 |
| M2INU6 | Uncharacterized protein | Streptococcus mutans SF1 | 71 |
| M2LHR5 | Uncharacterized protein | Streptococcus mutans 24 | 72 |
| J4TM44 | CRISPR-associated protein Cas9/Csn1, | Streptococcus anginosus SK1138 | 73 |
| | subtype II/NMEMI | | |
| M2JLG8 | Uncharacterized protein | Streptococcus mutans SM6 | 74 |
| I7QXF2 | Putative cytoplasmic protein | Streptococcus canis FSL Z3-227 | 75 |
| I3I1V4 | Putative cytoplasmic protein | Streptococcus pyogenes HKU | 76 |
| | | QMH11M0907901 | |
| J8T4Q2 | Uncharacterized protein | Streptococcus agalactiae GB00112 | 77 |
| E7S4M3 | Csn1 family CRISPR-associated protein | Streptococcus agalactiae ATCC 13813 | 78 |
| M2HZK2 | Uncharacterized protein | Streptococcus mutans NLML4 | 79 |
| M2DAT4 | Uncharacterized protein | Streptococcus mutans 1SM1 | 80 |
| M2GPV5 | CRISPR-associated protein | Streptococcus mutans NMT4863 | 81 |
| M5PJI2 | CRISPR-associated protein | Streptococcus parauberis KRS-02109 | 82 |
| F8Y040 | Putative uncharacterized protein | Streptococcus agalactiae FSL S3-026 | 83 |
| M2FXC0 | Uncharacterized protein | Streptococcus mutans 5SM3 | 84 |
| M2ENP9 | Uncharacterized protein | Streptococcus mutans NFSM2 | 85 |
| M1XWD6 | Uncharacterized protein | Streptococcus agalactiae SS1014 | 86 |
| K0U976 | Uncharacterized protein | Streptococcus agalactiae STIR-CD-17 | 87 |
| E0PEL3 | Csn1 family CRISPR-associated protein | Streptococcus bovis ATCC 700338 | 88 |
| M2EUD0 | Uncharacterized protein | Streptococcus mutans 3SN1 | 89 |
| E4L3R1 | CRISPR-associated protein, Csn1 | Streptococcus pseudoporcinus SPIN | 90 |
| | family | 20026 | |
| M2LYU7 | Uncharacterized protein | Streptococcus mutans R221 | 91 |
| M2IAS5 | Uncharacterized protein | Streptococcus mutans N3209 | 92 |
| M2KAP8 | Uncharacterized protein | Streptococcus mutans NLML1 | 93 |
| M2F4E1 | Uncharacterized protein | Streptococcus mutans N29 | 94 |
| E8JP81 | Csn1 family CRISPR-associated protein | Streptococcus equinus ATCC 9812 | 95 |
| M2G1L7 | Uncharacterized protein | Streptococcus mutans NVAB | 96 |
| J4K985 | CRISPR-associated protein Cas9/Csn1, | Streptococcus oralis SK304 | 97 |
| | subtype II/NMEMI | | |
| M2E7C1 | CRISPR-associated protein | Streptococcus mutans 15VF2 | 98 |
| Q3DQT5 | CRISPR-associated protein, SAG0894 | Streptococcus agalactiae 18RS21 | 99 |
| | family (Fragment) | | |
| M2IP01 | Uncharacterized protein | Streptococcus mutans SF14 | 100 |
| E6J3R0 | CRISPR-associated protein, Csn1 | Streptococcus anginosus F0211 | 101 |
| | family | | |
| G5JVJ9 | CRISPR-associated protein Cas9/Csn1, | Streptococcus macacae NCTC 11558 | 102 |
| | subtype II/NMEMI | | |
| K8MQ90 | CRISPR-associated protein cas9/csn1, | Streptococcus sp. F0441 | 103 |
| | subtype II/nmemi | | |
| M2KYT3 | Uncharacterized protein | Streptococcus mutans M230 | 104 |
| H8HAK7 | CRISPR-associated protein Csn1 | Streptococcus pyogenes MGAS15252 | 105 |
| M2HZJ5 | Uncharacterized protein | Streptococcus mutans NFSM1 | 106 |
| E4SQY2 | CRISPR-associated endonuclease, Csn1 | Streptococcus thermophilus (strain | 107 |
| | family | ND03) | |
| Q1JC13 | Hypothetical cytosolic protein | Streptococcus pyogenes serotype M12 | 108 |
| | | (strain MGAS2096) | |
| C6SPS8 | Uncharacterized protein | Streptococcus mutans serotype c (strain | 109 |
| | | NN2025) | |
| C5WH61 | CRISPR-associated protein Csn1 | Streptococcus dysgalactiae subsp. | 110 |
| | | equisimilis (strain GGS 124) | |
| Q8E042 | Putative uncharacterized protein | Streptococcus agalactiae serotype V | 111 |
| | | (strain ATCC BAA-611/2603 V/R) | |
| F5WVJ4 | CRISPR-associated protein | Streptococcus gallolyticus (strain ATCC | 112 |
| | | 43143/F-1867) | |
| D3HEH4 | CRISPR-associated protein | Streptococcus gallolyticus (strain | 113 |
| | | UCN34) | |
| J9YP56 | Uncharacterized protein | Streptococcus agalactiae serotype Ia | 114 |
| | | (strain GD201008-001) | |
| Q8E5R9 | Putative uncharacterized protein | Streptococcus agalactiae serotype III | 115 |
| | gbs0911 | (strain NEM316) | |
| F7IUC8 | Putative uncharacterized protein | Streptococcus pyogenes serotype M3 | 116 |
| | SPs1176 | (strain SSI-1) | |
| Q8DTE3 | Putative uncharacterized protein | Streptococcus mutans serotype c (strain | 117 |
| | | ATCC 700610/UA159) | |
| F0VS85 | CRISPR-associated protein | Streptococcus gallolyticus (strain ATCC | 118 |
| | | BAA-2069) | |
| B5XLC1 | Putative uncharacterized protein | Streptococcus pyogenes serotype M49 | 119 |
| | | (strain NZ131) | |
| Q3K1G4 | CRISPR-associated protein, SAG0894 | Streptococcus agalactiae serotype Ia | 120 |
| | family | (strain ATCC 27591/A909/CDC | |
| | | SS700) | |
| E8QAX4 | Hypothetical cytosolic protein | Streptococcus dysgalactiae subsp. | 121 |
| | | equisimilis (strain ATCC 12394/ | |
| | | D166B) | |
| H6PBR9 | CRISPR-associated protein, SAG0894 | Streptococcus infantarius (strain CJ18) | 122 |
| | family | | |
| Q48Z31 | Hypothetical cytosolic protein | Streptococcus pyogenes serotype M1 | 123 |
| Q1J6W2 | Hypothetical cytosolic protein | Streptococcus pyogenes serotype M4 | 124 |
| | | (strain MGAS10750) | |
| Q8K7R2 | Putative uncharacterized protein | Streptococcus pyogenes serotype M3 | 125 |
| | | (strain ATCC BAA-595/MGAS315) | |
| Q1JLZ6 | Hypothetical cytosolic protein | Streptococcus pyogenes serotype M12 | 126 |
| | | (strain MGAS9429) | |
| Q48TU5 | Hypothetical cytosolic protein | Streptococcus pyogenes serotype M28 | 127 |
| | | (strain MGAS6180) | |
| Q1JH43 | Hypothetical cytosolic protein | Streptococcus pyogenes serotype M2 | 128 |
| | | (strain MGAS10270) | |

[0036] Chylinski et al. (RNA Biology, 2013, 10:5, 726-737, herein incorporated by reference in its entirety including supplemental materials), has identified several Cas9 orthologs from Type II CRISPR-Cas loci.

[0037] According to the present invention, these enzymes may also serve as genome editing enzymes, e.g., CRISPR regulatable elements, of the invention and are given in Table 2. Given in the table are the gi accession numbers from NCBI and the name of the bacterial strain. It will be understood that such enzymes, when expressed in any organism other than the wild type strain may be codon optimized for that organism at the nucleic acid level.

TABLE 2
Cas9 Orthologs

| | | SEQ ID |
|---|---|---|
| gi Number | Strain | NO |
| 491523080 | Veillonella atypica ACS-134-V-Col7a | 129 |
| 492568239 | Fusobacterium nucleatum subsp. vincentii | 130 |
| | ATCC 49256 | |
| 291166249 | Filifactor alocis ATCC 35896 | 131 |
| 320130861 | Solobacterium moorei F0204 | 132 |
| 291520705 | Coprococcus catus GD-7 | 133 |
| 42525843 | Treponema denticola ATCC 35405 | 134 |
| 496176552 | Peptoniphilus duerdenii ATCC BAA-1640 | 135 |
| 493553119 | Catenibacterium mitsuokai DSM 15897 | 136 |
| 24379809 | Streptococcus mutans UA159 | 137 |
| 15675041 | Streptococcus pyogenes SF370 | 138 |
| 499300419 | Listeria innocua Clip11262 | 139 |
| 500000752 | Streptococcus thermophilus LMD-9 | 140 |
| 323463801 | Staphylococcus pseudintermedius | 141 |
| 352684361 | Acidaminococcus intestini RyC-MR95 | 142 |
| 503017123 | Olsenella uli DSM 7084 | 143 |
| 366983953 | Oenococcus kitaharae DSM 17330 | 144 |
| 503128334 | Bifidobacterium bifidum S17 | 145 |
| 504382875 | Lactobacillus rhamnosus GG | 146 |
| 489744644 | Lactobacillus gasseri JV-V03 | 147 |
| 501247123 | Finegoldia magna ATCC 29328 | 148 |
| 47458196 | Mycoplasma mobile 163K | 149 |
| 284931710 | Mycoplasma gallisepticum str. F | 150 |
| 498006766 | Mycoplasma ovipneumoniae SC01 | 151 |
| 384393286 | Mycoplasma canis PG 14 | 152 |
| 144575181 | Mycoplasma synoviae 53 | 153 |
| 238875750 | Eubacterium rectale ATCC 33656 | 154 |
| 500000239 | Streptococcus thermophilus LMD-9 | 155 |
| 315149830 | Enterococcus faecalis TX0012 | 156 |
| 488391463 | Staphylococcus lugdunensis M23590 | 157 |
| 158432258 | Eubacterium dolichum DSM 3991 | 158 |
| 497700222 | Lactobacillus coryniformis subsp. torquens | 159 |
| | KCTC 3535 | |
| 503154365 | Ilyobacter polytropus DSM 2926 | 160 |
| 488935851 | Ruminococcus albus 8 | 161 |
| 187426541 | Akkermansia muciniphila ATCC BAA-835 | 162 |
| 117649621 | Acidothermus cellulolyticus 11B | 163 |
| 189429199 | Bifidobacterium longum DJO10A | 164 |
| 502666262 | Bifidobacterium dentium Bd1 | 165 |
| 499236428 | Corynebacterium diphtheriae NCTC 13129 | 166 |
| 501382854 | Elusimicrobium minutum Pei191 | 167 |
| 319419610 | Nitratifractor salsuginis DSM 16511 | 168 |
| 324027241 | Sphaerochaeta globus str. Buddy | 169 |
| 502574305 | Fibrobacter succinogenes subsp. succinogenes | 170 |
| | S85 | |
| 496648031 | Bacteroides fragilis NCTC 9343 | 171 |
| 506262077 | Capnocytophaga ochracea DSM 7271 | 172 |
| 499794158 | Rhodopseudomonas palustris BisB18 | 173 |
| 494010777 | Prevotella micans F0438 | 174 |
| 294472455 | Prevotella ruminicola 23 | 175 |
| 503930464 | Flavobacterium columnare ATCC 49512 | 176 |
| 310782306 | Aminomonas paucivorans DSM 12260 | 177 |
| 83591793 | Rhodospirillum rubrum ATCC 11170 | 178 |
| 502812437 | Candidatus Puniceispirillum marinum | 179 |
| | IMCC1322 | |
| 500133006 | Verminephrobacter eiseniae EF01-2 | 180 |
| 344171927 | Ralstonia syzygii R24 | 181 |
| 159042956 | Dinoroseobacter shibae DFL 12 | 182 |
| 288910049 | Azospirillum sp-B510 | 183 |
| 91802344 | Nitrobacter hamburgensis X14 | 184 |
| 146407516 | Bradyrhizobium sp-BTAi1 | 185 |
| 499451825 | Wolinella succinogenes DSM 1740 | 186 |
| 218563121 | Campylobacter jejuni subsp. jejuni NCTC 11168 | 187 |
| 502787413 | Helicobacter mustelae 12198 | 188 |
| 447027826 | Bacillus cereus Rock1-15 | 189 |
| 501844634 | Acidovorax ebreus TPSY | 190 |
| 189485225 | uncultured Termite group 1 bacterium | 191 |
| | phylotype RsD17 | |
| 489569047 | Clostridium perfringens D str. JGS1721 | 192 |
| 506406750 | Clostridium cellulolyticum H10 | 193 |
| 154154505 | Parvibaculum lavamentivorans DS-1 | 194 |
| 493910016 | Roseburia intestinalis L1-82 | 195 |
| 488163954 | Neisseria meningitidis Z2491 | 196 |
| 499209493 | Pasteurella multocida subsp. multocida str. Pm70 | 197 |
| 491573077 | Sutterella wadsworthensis 3 1 45B | 198 |
| 495559660 | gamma proteobacterium HTCC5015 | 199 |
| 499526152 | Legionella pneumophila str. Paris | 200 |
| 496140336 | Parasutterella excrementihominis YIT 11859 | 201 |
| 499451967 | Wolinella succinogenes DSM 1740 | 202 |
| 489129153 | Francisella novicida U112 | 203 |

[0038] Any of the enzymes or proteins of Tables 1 or 2 may be a CRISPR regulatable element. Further, any cas9 or cas9 ortholog may be fused to a destabilizing domain such as, but not limited to, FK506 Binding Protein (FKBP), E. coli dihydrofolate reductase (DHFR), mouse ornithine decarboxylase (MODC), or estrogen receptors (ER).

[0039] In one embodiment, the destabilizing domain may be from an estrogen receptor.

[0040] In one embodiment, the CRISPR regulatable element may comprise a destabilizing sequence such as, but not limited to, a 3′UTR with AU-rich elements or AUUUA motifs. Destabilizing sequences can be chosen from those in cytokines, proto-oncogenes, interferon mRNAs or human estrogen receptor alpha. As a non-limiting example, the mRNA sequence for any cas9 or cas9 ortholog may comprise a destabilizing sequence, such as, but not limited to, a 3′UTR with AU-rich elements or AUUUA motifs.

[0041] Several protospacer adjacent motifs (PAMs) have been identified in the art (Westra et al., Annu. Rev. Genet. 2012, 46: 311-39; the contents of which are incorporated herein by reference in their entirety). Such PAMs may be used to inform the selection of and/or design of the nucleic acid compositions, e.g., CRISPR-AAV constructs, of the present invention. It is also contemplated that utilization of certain Type III enzymes such as those from Staphylococcus epidermidis, Pyrococcus furiosus or S. solfatarcicus will not require the presence of a PAM sequence. PAMs useful in the present invention are given in Table 3. In the table the PAM either follows or precedes the protospacer (that region of the DNA found immediately upstream or downstream of the PAM and on the opposite DNA strand that hybridizes with the sgRNA).

TABLE 3
PAM sequences

| PAM | SEQ ID NO |
|---|---|
| Protospacer-NGG | 204-207 |
| Protospacer-GAA | 208-209 |
| Protospacer-CTT | 2010-211 |
| Protospacer-CAT | 212 |
| Protospacer-CCT | 213 |
| Protospacer-CTC | 214 |
| Protospacer-GG | 215-216 |
| WTTCTNN-Protospacer | 217 |
| TTTYRNNN-Protospacer | 218 |
| CNCCN-Protospacer | 219 |
| CCN-Protospacer | 220-21 |

[0042] According to the present invention, AAV particles comprising the nucleic acids of the CRISPR regulatable elements may be AAV1, AAV2, AAV2G9, AAV3, AAV3a, AAV3b, AAV3-3, AAV4, AAV4-4, AAV5, AAV6, AAV6.1, AAV6.2, AAV6.1.2, AAV7, AAV7.2, AAV8, AAV9, AAV9.11, AAV9.13, AAV9.16, AAV9.24, AAV9.45, AAV9.47, AAV9.61, AAV9.68, AAV9.84, AAV9.9, AAV10, AAV11, AAV12, AAV16.3, AAV24.1, AAV27.3, AAV42.12, AAV42-1b, AAV42-2, AAV42-3a, AAV42-3b, AAV42-4, AAV42-5a, AAV42-5b, AAV42-6b, AAV42-8, AAV42-10, AAV42-11, AAV42-12, AAV42-13, AAV42-15, AAV42-aa, AAV43-1, AAV43-12, AAV43-20, AAV43-21, AAV43-23, AAV43-25, AAV43-5, AAV44.1, AAV44.2, AAV44.5, AAV223.1, AAV223.2, AAV223.4, AAV223.5, AAV223.6, AAV223.7, AAV1-7/rh.48, AAV1-8/rh.49, AAV2-15/rh.62, AAV2-3/rh.61, AAV2-4/rh.50, AAV2-5/rh.51, AAV3.1/hu.6, AAV3.1/hu.9, AAV3-9/rh.52, AAV3-11/rh.53, AAV4-8/rh.64, AAV4-9/rh.54, AAV4-19/rh.55, AAV5-3/rh.57, AAV5-22/rh.58, AAV7.3/hu.7, AAV16.8/hu.10, AAV16.12/hu.11, AAV29.3/bb.1, AAV29.5/bb.2, AAV106.1/hu.37, AAV114.3/hu.40, AAV127.2/hu.41, AAV127.5/hu.42, AAV128.3/hu.44, AAV130.4/hu.48, AAV145.1/hu.53, AAV145.5/hu.54, AAV145.6/hu.55, AAV161.10/hu.60, AAV161.6/hu.61, AAV33.12/hu.17, AAV33.4/hu.15, AAV33.8/hu.16, AAV52/hu.19, AAV52.1/hu.20, AAV58.2/hu.25, AAVA3.3, AAVA3.4, AAVA3.5, AAVA3.7, AAVC1, AAVC2, AAVC5, AAV-DJ, AAV-DJ8, AAVF3, AAVF5, AAVH2, AAVH6, AAVLK03, AAVH-1/hu.1, AAVH-5/hu.3, AAVLG-10/rh.40, AAVLG-4/rh.38, AAVLG-9/hu.39, AAVN721-8/rh.43, AAVCh.5, AAVCh.5R1, AAVcy.2, AAVcy.3, AAVcy.4, AAVcy.5, AAVCy.5R1, AAVCy.5R2, AAVCy.5R3, AAVCy.5R4, AAVcy.6, AAVhu.1, AAVhu.2, AAVhu.3, AAVhu.4, AAVhu.5, AAVhu.6, AAVhu.7, AAVhu.9, AAVhu.10, AAVhu.11, AAVhu.13, AAVhu.15, AAVhu.16, AAVhu.17, AAVhu.18, AAVhu.20, AAVhu.21, AAVhu.22, AAVhu.23.2, AAVhu.24, AAVhu.25, AAVhu.27, AAVhu.28, AAVhu.29, AAVhu.29R, AAVhu.31, AAVhu.32, AAVhu.34, AAVhu.35, AAVhu.37, AAVhu.39, AAVhu.40, AAVhu.41, AAVhu.42, AAVhu.43, AAVhu.44, AAVhu.44R1, AAVhu.44R2, AAVhu.44R3, AAVhu.45, AAVhu.46, AAVhu.47, AAVhu.48, AAVhu.48R1, AAVhu.48R2, AAVhu.48R3, AAVhu.49, AAVhu.51, AAVhu.52, AAVhu.54, AAVhu.55, AAVhu.56, AAVhu.57, AAVhu.58, AAVhu.60, AAVhu.61, AAVhu.63, AAVhu.64, AAVhu.66, AAVhu.67, AAVhu.14/9, AAVhu.t 19, AAVrh.2, AAVrh.2R, AAVrh.8, AAVrh.8R, AAVrh.10, AAVrh.12, AAVrh.13, AAVrh.13R, AAVrh.14, AAVrh.17, AAVrh.18, AAVrh.19, AAVrh.20, AAVrh.21, AAVrh.22, AAVrh.23, AAVrh.24, AAVrh.25, AAVrh.31, AAVrh.32, AAVrh.33, AAVrh.34, AAVrh.35, AAVrh.36, AAVrh.37, AAVrh.37R2, AAVrh.38, AAVrh.39, AAVrh.40, AAVrh.46, AAVrh.48, AAVrh.48.1, AAVrh.48.1.2, AAVrh.48.2, AAVrh.49, AAVrh.51, AAVrh.52, AAVrh.53, AAVrh.54, AAVrh.56, AAVrh.57, AAVrh.58, AAVrh.61, AAVrh.64, AAVrh.64R1, AAVrh.64R2, AAVrh.67, AAVrh.73, and/or AAVrh.74 serotypes, and variants thereof.

[0043] In one embodiment, the AAV serotype may be or have a sequence as described in United States Publication No. US20030138772, herein incorporated by reference in its entirety, such as, but not limited to, AAV1 (SEQ ID NO: 6 and 64 of US20030138772), AAV2 (SEQ ID NO: 7 and 70 of US20030138772), AAV3 (SEQ ID NO: 8 and 71 of US20030138772), AAV4 (SEQ ID NO: 63 of US20030138772), AAV5 (SEQ ID NO: 114 of US20030138772), AAV6 (SEQ ID NO: 65 of US20030138772), AAV7 (SEQ ID NO: 1-3 of US20030138772), AAV8 (SEQ ID NO: 4 and 95 of US20030138772), AAV9 (SEQ ID NO: 5 and 100 of US20030138772), AAV10 (SEQ ID NO: 117 of US20030138772), AAV11 (SEQ ID NO: 118 of US20030138772), AAV12 (SEQ ID NO: 119 of US20030138772), AAVrh10 (amino acids 1 to 738 of SEQ ID NO: 81 of US20030138772) or variants thereof. Non limiting examples of variants include SEQ ID NOs: 9, 27-45, 47-62, 66-69, 73-81, 84-94, 96, 97, 99, 101-113 of US20030138772, the contents of which are herein incorporated by reference in its entirety.

[0044] In one embodiment, the AAV serotype may be or may have a sequence as described in United States Publication No. US20150159173, herein incorporated by reference in its entirety, such as, but not limited to, AAV2 (SEQ ID NO: 7 and 23 of US20150159173), rh20 (SEQ ID NO: 1 of US20150159173), rh32/33 (SEQ ID NO: 2 of US20150159173), rh39 (SEQ ID NO: 3, 20 and 36 of US20150159173), rh46 (SEQ ID NO: 4 and 22 of US20150159173), rh73 (SEQ ID NO: 5 of US20150159173), rh74 (SEQ ID NO: 6 of US20150159173), AAV6.1 (SEQ ID NO: 29 of US20150159173), rh.8 (SEQ ID NO: 41 of US20150159173), rh.48.1 (SEQ ID NO: 44 of US20150159173), hu.44 (SEQ ID NO: 45 of US20150159173), hu.29 (SEQ ID NO: 42 of US20150159173), hu.48 (SEQ ID NO: 38 of US20150159173), rh54 (SEQ ID NO: 49 of US20150159173), AAV2 (SEQ ID NO: 7 of US20150159173), cy.5 (SEQ ID NO: 8 and 24 of US20150159173), rh.10 (SEQ ID NO: 9 and 25 of US20150159173), rh.13 (SEQ ID NO: 10 and 26 of US20150159173), AAV1 (SEQ ID NO: 11 and 27 of US20150159173), AAV3 (SEQ ID NO: 12 and 28 of US20150159173), AAV6 (SEQ ID NO: 13 and 29 of US20150159173), AAV7 (SEQ ID NO: 14 and 30 of US20150159173), AAV8 (SEQ ID NO: 15 and 31 of US20150159173), hu.13 (SEQ ID NO: 16 and 32 of US20150159173), hu.26 (SEQ ID NO: 17 and 33 of US20150159173), hu.37 (SEQ ID NO: 18 and 34 of US20150159173), hu.53 (SEQ ID NO: 19 and 35 of US20150159173), rh.43 (SEQ ID NO: 21 and 37 of US20150159173), rh2 (SEQ ID NO: 39 of US20150159173), rh.37 (SEQ ID NO: 40 of US20150159173), rh.64 (SEQ ID NO: 43 of US20150159173), rh.48 (SEQ ID NO: 44 of US20150159173), ch.5 (SEQ ID NO 46 of US20150159173), rh.67 (SEQ ID NO: 47 of US20150159173), rh.58 (SEQ ID NO: 48 of US20150159173), or variants thereof including, but not limited to Cy5R1, Cy5R2, Cy5R3, Cy5R4, rh.13R, rh.37R2, rh.2R, rh.8R, rh.48.1, rh.48.2, rh.48.1.2, hu.44R1, hu.44R2, hu.44R3, hu.29R, ch.5R1, rh64R1, rh64R2, AAV6.2, AAV6.1, AAV6.12, hu.48R1, hu.48R2, and hu.48R3.

[0045] In one embodiment, the AAV serotype may be or have the sequence as described in U.S. Pat. No. 7,198,951, herein incorporated by reference in its entirety, such as, but not limited to, AAV9 (SEQ ID NO: 1-3 of U.S. Pat. No. 7,198,951), AAV2 (SEQ ID NO: 4 of U.S. Pat. No. 7,198,951), AAV1 (SEQ ID NO: 5 of U.S. Pat. No. 7,198,951), AAV3 (SEQ ID NO: 6 of U.S. Pat. No. 7,198,951), and AAV8 (SEQ ID NO: 7).

[0046] In one embodiment, the AAV serotype may be or have a mutation in the AAV9 sequence as described by N Pulicherla et al. (Molcular Therapy 19(6):1070-1078 (2011), herein incorporated by reference in its entirety), such as but not limited to, AAV9.9, AAV9.11, AAV9.13, AAV9.16, AAV9.24, AAV9.45, AAV9.47, AAV9.61, AAV9.68, AAV9.84.

[0047] In one embodiment, the AAV serotype may be or have a sequence as described in U.S. Pat. No. 6,156,303, herein incorporated by reference in its entirety, such as, but not limited to, AAV3B (SEQ ID NO: 1 and 10 of U.S. Pat. No. 6,156,303), AAV6 (SEQ ID NO: 2, 7 and 11 of U.S. Pat. No. 6,156,303), AAV2 (SEQ ID NO: 3 and 8 of U.S. Pat. No. 6,156,303), AAV3A (SEQ ID NO: 4 and 9, of U.S. Pat. No. 6,156,303), or derivatives thereof.

[0048] In one embodiment, the AAV serotype may be or may have a sequence as described in United States Publication No. US20140359799, herein incorporated by reference in its entirety, such as, but not limited to, AAV8 (SEQ ID NO: 1 of US20140359799), AAVDJ (SEQ ID NO: 2 and 3 of US20140359799), or variants thereof.

[0049] In one embodiment, the AAV serotype may be or have the sequence of AAV4 as described in International Publication No. WO1998011244, herein incorporated by reference in its entirety, such as, but not limited to AAV4 (SEQ ID NO: 1-20 of WO1998011244).

[0050] In one embodiment, the AAV serotype may be or have a mutation in the AAV2 sequence to generate AAV2G9 as described in International Publication No. WO2014144229 and herein incorporated by reference in its entirety.

[0051] In one embodiment, the AAV serotype may be or have a sequence as described in International Publication WO2005033321, herein incorporated by reference in its entirety, such as, but not limited to AAV1 (SEQ ID NO: 202 and 219 of WO2005033321), AAV2 (SEQ ID NO: 211 and 221 of WO2005033321), AAV3-3 (SEQ ID NO: 200 and 217 of WO2005033321), AAV4-4 (SEQ ID NO: 201 and 218 of WO2005033321), AAV5 (SEQ ID NO: 216 and 199 of WO2005033321), AAV6 (SEQ ID NO: 203 and 220 of WO2005033321), AAV7 (SEQ ID NO: 213 and 222 of WO2005033321), AAV8 (SEQ ID NO: 214 and 223 of WO2005033321), hu.14/AAV9 (SEQ ID NO: 3 and 123 of WO2005033321), hu.17 (SEQ ID NO: 83 of WO2005033321), hu.6 (SEQ ID NO: 84 of WO2005033321), hu.42 (SEQ ID NO: 85 of WO2005033321), rh.38 (SEQ ID NO: 86 of WO2005033321), hu.40 (SEQ ID NO: 87 of WO2005033321), hu.37 (SEQ ID NO: 88 of WO2005033321), rh.40 (SEQ ID NO: 92 of WO2005033321), rh.52 (SEQ ID NO: 96 of WO2005033321), rh.53 (SEQ ID NO: 97 of WO2005033321), rh.49 (SEQ ID NO: 103 of WO2005033321), rh.51 (SEQ ID NO: 104 of WO2005033321), rh.57 (SEQ ID NO: 105 of WO2005033321), rh.58 (SEQ ID NO: 106 of WO2005033321), rh.61 (SEQ ID NO: 107 of WO2005033321), rh.50 (SEQ ID NO: 108 of WO2005033321), rh.43 (SEQ ID NO: 163 of WO2005033321), rh.62 (SEQ ID NO: 114 of WO2005033321), rh.48 (SEQ ID NO: 115 of WO2005033321), 4-9/rh.54 (SEQ ID NO: 116 of WO2005033321), 4-19/rh.55 (SEQ ID NO: 117 of WO2005033321), hu.31 (SEQ ID NO: 121 of WO2005033321), hu.32 (SEQ ID NO: 122 of WO2005033321), hu.34 (SEQ ID NO: 125 of WO2005033321), hu.45 (SEQ ID NO: 127 of WO2005033321), hu.47 (SEQ ID NO: 128 of WO2005033321), hu.13 (SEQ ID NO: 129 of WO2005033321), hu.28 (SEQ ID NO: 130 of WO2005033321), hu.29 (SEQ ID NO: 132 of WO2005033321), hu.19 (SEQ ID NO: 133 of WO2005033321), hu.20 (SEQ ID NO: 134 of WO2005033321), hu.21 (SEQ ID NO: 135 of WO2005033321), hu.23.2 (SEQ ID NO: 137 of WO2005033321), hu.22 (SEQ ID NO: 138 of WO2005033321), hu.27 (SEQ ID NO: 140 of WO2005033321), hu.4 (SEQ ID NO: 141 of WO2005033321), hu.2 (SEQ ID NO: 143 of WO2005033321), hu.1 (SEQ ID NO: 144 of WO2005033321), hu.3 (SEQ ID NO: 145 of WO2005033321), hu.25 (SEQ ID NO: 146 of WO2005033321), hu.15 (SEQ ID NO: 147 of WO2005033321), hu.16 (SEQ ID NO: 148 of WO2005033321), hu.18 (SEQ ID NO: 149 of WO2005033321), hu.7 (SEQ ID NO: 150 of WO2005033321), hu.11 (SEQ ID NO: 153 of WO2005033321), hu.9 (SEQ ID NO: 155 of WO2005033321), hu.10 (SEQ ID NO: 156 of WO2005033321), hu.48 (SEQ ID NO: 157 of WO2005033321), hu.44 (SEQ ID NO: 144 of WO2005033321), hu.46 (SEQ ID NO: 159 of WO2005033321), hu.43 (SEQ ID NO: 160 of WO2005033321), hu.35 (SEQ ID NO: 164 of WO2005033321), hu.24 (SEQ ID NO: 136 of WO2005033321), rh.64 (SEQ ID NO: 99 of WO2005033321), hu.41 (SEQ ID NO: 91 of WO2005033321), hu.39 (SEQ ID NO: 102 of WO2005033321), hu.67 (SEQ ID NO: 198 of WO2005033321), hu.66 (SEQ ID NO: 197 of WO2005033321), hu.51 (SEQ ID NO: 190 of WO2005033321), hu.52 (SEQ ID NO: 191 of WO2005033321), hu.49 (SEQ ID NO: 189 of WO2005033321), hu.56 (SEQ ID NO: 192 of WO2005033321), hu.57 (SEQ ID NO: 193 of WO2005033321), hu.58 (SEQ ID NO: 194 of WO2005033321), hu.63 (SEQ ID NO: 195 of WO2005033321), hu.64 (SEQ ID NO: 196), hu.60 (SEQ ID NO: 184 of WO2005033321), hu.61 (SEQ ID NO: 185 of WO2005033321), hu.53 (SEQ ID NO: 186 of WO2005033321), hu.55 (SEQ ID NO: 187 of WO2005033321), hu.54 (SEQ ID NO: 188 of WO2005033321), hu.6 (SEQ ID NO: 84 of WO2005033321), rh.56 (SEQ ID NO: 152 of WO2005033321), or variants thereof. Non limiting examples of variants include SEQ ID NOs: 1, 2, 4-82, 89, 90, 93-95, 98, 100, 101, 109-113, 118-120, 124, 126, 131, 139, 142, 151, 154, 158, 161, 162, 165-183, 202, 204-212, 215, 219, 224-236 of WO2005033321, the contents of which are herein incorporated by reference in its entirety.

[0052] In one embodiment, the serotype which may be useful in the present invention may be AAVDJ8 (or AAV-DJ8). The amino acid sequence of AAVDJ8 may comprise two or more mutations in order to remove the heparin binding domain (HBD). As a non-limiting example, the AAV-DJ sequence described as SEQ ID NO: 1 in U.S. Pat. No. 7,588,772, the contents of which are herein incorporated by reference in their entirety, may comprise two mutations: (1) R587Q where arginine (R; Arg) at amino acid 587 is changed to glutamine (Q; Gln) and (2) R590T where arginine (R; Arg) at amino acid 590 is changed to threonine (T; Thr). As another non-limiting example, may comprise three mutations: (1) K406R where lysine (K; Lys) at amino acid 406 is changed to arginine (R; Arg), (2) R587Q where arginine (R; Arg) at amino acid 587 is changed to glutamine (Q; Gln) and (3) R590T where arginine (R; Arg) at amino acid 590 is changed to threonine (T; Thr).

[0053] The present invention also provides pharmaceutical compositions comprising at least one AAV particle having a CRISPR regulatable element and a pharmaceutically acceptable excipient. In some aspects, one or more CRISPR regulatable elements are contained in an AAV particle.

CRISPR-AAV Particle Payload: Transgenes, Polypeptide-Encoding Polynucleotides. and/or Modulatory Nucleic Acids

[0054] In some embodiments, the present invention provides methods for inhibiting, silencing or inducing, activating, and/or initiating expression of a gene in a cell.

[0055] The CRISPR-AAV particles of the present invention comprise a nucleic acid sequence e.g., polynucleotide, encoding at least one “payload.” As used herein, a “payload” refers to one or more polynucleotides or polynucleotide regions encoded by or within a viral genome or an expression product of such polynucleotide or polynucleotide region e.g., a transgene, a polynucleotide encoding a polypeptide or multi polypeptide or a modulatory nucleic acid or regulatory nucleic acid.

[0056] The payload may comprise any nucleic acid known in the art which is useful for modulating the expression (by supplementation or gene replacement or by inhibition using a modulatory nucleic acid) in a target cell transduced or contacted with the CRISPR-AAV particle carrying the payload.

[0057] Vectors used in the production of CRISPR-AAV particles include those encoding the payload, e.g. payload construct vectors, and those encoding accessory proteins necessary for production, e.g. viral construct vectors.

[0058] According to the present invention, a CRISPR-AAV payload construct vector encodes a “payload construct.” In one embodiment, a “payload construct” is a polynucleotide sequence encoding at least a payload and sufficient ITR sequence to allow for replication thereby producing a viral genome that is packaged inside a capsid.

[0059] The payload construct may comprise a combination of coding and non-coding nucleic acid sequences.

[0060] In one embodiment, the CRISPR-AAV payload construct vector comprises more than one nucleic acid sequences encoding more than one payload of interest. In such an embodiment, a payload construct encoding more than one payload may be replicated and packaged into a viral particle. A target cell transduced with a viral particle comprising more than one payload may express each of the payloads in a single cell.

[0061] In some embodiments, the CRISPR-AAV payload construct may encode a coding or non-coding RNA.

[0062] Where the CRISPR-AAV payload construct sequence encodes a polypeptide, the polypeptide may be a peptide or protein. A protein encoded by the CRISPR-AAV payload construct sequence may comprise a secreted protein, an intracellular protein, an extracellular protein, and/or a membrane protein. The encoded proteins may be structural or functional. Proteins encoded by the payload construct vector or payload construct include, but are not limited to, mammalian proteins. The CRISPR-AAV polynucleotides encoding polypeptides (e.g., mRNA) of the invention may be useful in the fields of human disease, antibodies, viruses, veterinary applications and a variety of in vivo and in vitro settings.

[0063] In some embodiments, the CRISPR-AAV particles are useful in the field of medicine for the treatment, palliation or amelioration of conditions or diseases such as, but not limited to, blood, cardiovascular, CNS, dermatology, endocrinology, genetic, genitourinary, gastrointestinal, musculoskeletal, oncology, and immunology, respiratory, sensory and anti-infective.

[0064] In some embodiments, CRISPR-AAV particles in accordance with the present invention may be used for the treatment of disorders, and/or conditions, including but not limited to one or more of the following: autoimmune disorders (e.g. diabetes, lupus, multiple sclerosis, psoriasis, rheumatoid arthritis); inflammatory disorders (e.g. arthritis, pelvic inflammatory disease); neurological disorders (e.g. Alzheimer's disease, Huntington's disease; autism; Parkinson's disease, amyotrophic lateral sclerosis, Friedrich's Ataxia, spinal muscular atrophy); cardiovascular disorders (e.g. atherosclerosis, hypercholesterolemia, thrombosis, clotting disorders, angiogenic disorders such as macular degeneration); proliferative disorders (e.g. cancer, benign neoplasms); respiratory disorders (e.g. chronic obstructive pulmonary disease); digestive disorders (e.g. inflammatory bowel disease, ulcers); musculoskeletal disorders (e.g. fibromyalgia, arthritis); endocrine, metabolic, and nutritional disorders (e.g. diabetes, osteoporosis); urological disorders (e.g. renal disease); psychological disorders (e.g. depression, schizophrenia); skin disorders (e.g. wounds, eczema); blood and lymphatic disorders (e.g. anemia, hemophilia); etc.

[0065] In some embodiments, the CRISPR-AAV payload construct encodes a messenger RNA (mRNA). As used herein, the term “messenger RNA” (mRNA) refers to any polynucleotide which encodes a polypeptide of interest and which is capable of being translated to produce the encoded polypeptide of interest in vitro, in vivo, in situ or ex vivo.

[0066] Traditionally, the basic components of an mRNA molecule include at least a coding region, a 5′UTR, a 3′UTR, a 5′ cap and a poly-A tail. According to the present invention, CRISPR-AAV payload constructs encoding mRNA may comprise a coding region only. They may also comprise a coding region and at least one UTR. They may also comprise a coding region, 3′UTR and polyA tail. In some embodiments, the mRNA or any portion of the CRISPR-AAV may be codon optimized.

[0067] In one embodiment the polypeptide encoded by the payload construct is between 50-5000 amino acids in length. In some embodiments the protein encoded is between 50-2000 amino acids in length. In some embodiments the protein encoded is between 50-1000 amino acids in length. In some embodiments the protein encoded is between 50-1500 amino acids in length. In some embodiments the protein encoded is between 50-1000 amino acids in length. In some embodiments the protein encoded is between 50-800 amino acids in length. In some embodiments the protein encoded is between 50-600 amino acids in length. In some embodiments the protein encoded is between 50-400 amino acids in length. In some embodiments the protein encoded is between 50-200 amino acids in length. In some embodiments the protein encoded is between 50-100 amino acids in length.

[0068] In some embodiments the peptide encoded by the payload construct is between 4-50 amino acids in length. In one embodiment, the shortest length of a region of the payload molecule of the present invention encoding a peptide can be the length that is sufficient to encode for a tetrapeptide, a pentapeptide, a hexapeptide, a heptapeptide, an octapeptide, a nonapeptide, or a decapeptide. In another embodiment, the length may be sufficient to encode a peptide of 2-30 amino acids, e.g. 5-30, 10-30, 2-25, 5-25, 10-25, or 10-20 amino acids. The length may be sufficient to encode for a peptide of at least 11, 12, 13, 14, 15, 17, 20, 25 or 30 amino acids, or a peptide that is no longer than 50 amino acids, e.g. no longer than 35, 30, 25, 20, 17, 15, 14, 13, 12, 11 or 10 amino acids.

[0069] Modulatory Nucleic Acids

[0070] An RNA encoded by the CRISPR-AAV payload construct may comprise an mRNA, tRNA, rRNA, tmRNA, miRNA, RNAi, siRNA, piRNA, shRNA antisense RNA, double stranded RNA, snRNA, snoRNA, and long non-coding RNA (ncRNA). Examples of such lncRNA molecules and RNAi constructs designed to target such lncRNA any of which may be encoded in the payload constructs are taught in International Publication WO2012/018881, the contents of which are incorporated herein by reference in their entirety.

[0071] In one embodiment, the CRISPR-AAV payload construct encodes a microRNA or miRNA or engineered precursors thereof as the payload. These payloads along with siRNA, shRNA antisense molecules and the like are also referred to as modulatory nucleic acid payloads.

[0072] microRNAs (or miRNA) are 19-25 nucleotide long noncoding RNAs that bind to the 3′UTR of nucleic acid molecules and down-regulate gene expression either by reducing nucleic acid molecule stability or by inhibiting translation. The payload constructs of the invention may comprise one or more microRNA target sequences, microRNA sequences, or microRNA seeds. Such sequences may correspond to any known microRNA such as those taught in US Publication US2005/0261218 and US Publication US2005/0059005, the contents of which are incorporated herein by reference in their entirety.

[0073] A microRNA sequence comprises a “seed” region, i.e., a sequence in the region of positions 2-8 of the mature microRNA, which sequence has perfect Watson-Crick complementarity to the miRNA target sequence. A microRNA seed may comprise positions 2-8 or 2-7 of the mature microRNA. In some embodiments, a microRNA seed may comprise 7 nucleotides (e.g., nucleotides 2-8 of the mature microRNA), wherein the seed-complementary site in the corresponding miRNA target is flanked by an adenine (A) opposed to microRNA position 1. In some embodiments, a microRNA seed may comprise 6 nucleotides (e.g., nucleotides 2-7 of the mature microRNA), wherein the seed-complementary site in the corresponding miRNA target is flanked by an adenine (A) opposed to microRNA position 1. See for example, Grimson A, Farh K K, Johnston W K, Garrett-Engele P, Lim L P, Bartel D P; Mol Cell. 2007 Jul. 6; 27(1):91-105; each of which is herein incorporated by reference in their entirety. The bases of the microRNA seed have complete complementarity with the target sequence.

### Functional Payloads

[0074] A payload may comprise polypeptides that serve as marker proteins to assess cell transformation and expression, fusion proteins, polypeptides having a desired biological activity, gene products that can complement a genetic defect, RNA molecules, transcription factors, and other gene products that are of interest in regulation and/or expression. A payload may comprise nucleotide sequences that provide a desired effect or regulatory function (e.g., transposons, transcription factors). A payload may comprise hormone receptors (e.g., mineral corticosteroid, glucocorticoid, and thyroid hormone receptors); intramembrane proteins (e.g., TM-1 and TM-7); intracellular receptors (e.g., orphans, retinoids, vitamin D3 and vitamin A receptors); signaling molecules (e.g., kinases, transcription factors, or molecules such signal transducers and activators of transcription receptors of the cytokine superfamily (e.g. erythropoietin, growth hormone, interferons, and interleukins, and colony-stimulating factors; G-protein coupled receptors, e.g., hormones, calcitonin, epinephrine, gastrin, and paracrine or autocrine mediators, such as somatostatin or prostaglandins; neurotransmitter receptors (norepinephrine, dopamine, serotonin or acetylcholine); pathogenic antigens, which can be of viral, bacterial, allergenic, or cancerous origin; and tyrosine kinase receptors (such as insulin growth factor, and nerve growth factor).

[0075] A payload may comprise a gene therapy product. A gene therapy product may comprise a polypeptide, RNA molecule, or other gene product that, when expressed in a target cell, provides a desired therapeutic effect. In some embodiments, a gene therapy product may comprise a substitute for a non-functional gene that is absent or mutated.

[0076] A CRISPR-AAV payload construct encoding a payload may comprise a selectable marker. A selectable marker may comprise a gene sequence or a protein encoded by that gene sequence expressed in a host cell that allows for the identification, selection, and/or purification of the host cell from a population of cells that may or may not express the selectable marker. In one embodiment the selectable marker provides resistance to survive a selection process that would otherwise kill the host cell, such as treatment with an antibiotic. In some embodiments an antibiotic selectable marker may comprise one or more antibiotic resistance factors, including but not limited to neomycin resistance (e.g., neo), hygromycin resistance, kanamycin resistance, and/or puromycin resistance.

[0077] In some embodiments a selectable marker may comprise a cell-surface marker, such as any protein expressed on the surface of the cell including, but not limited to receptors, CD markers, lectins, integrins, or truncated versions thereof. In some embodiments, cells that comprise a cell-surface marker may be selected using an antibody targeted to the cell-surface marker. In some embodiments an antibody targeted to the cell-surface marker may be directly conjugated with a selection agent including, but not limited to a fluorophore, sepharose, or magnetic bead. In some embodiments an antibody targeted to the cell-surface marker may be detected using a secondary labeled antibody or substrate which binds to the antibody targeted to the cell-surface marker. In some embodiments, a selectable marker may comprise negative selection by using an enzyme, including but not limited to Herpes simplex virus thymidine kinase (HSVTK) that converts a pro-toxin (ganciclovir) into a toxin or bacterial Cytosine Deaminase (CD) which converts the pro-toxin 5′-fluorocytosine (5′-FC) into the toxin 5′-fluorouracil (5′-FU). In some embodiments, any nucleic acid sequence encoding a polypeptide can be used as a selectable marker comprising recognition by a specific antibody.

[0078] In some embodiments, a payload construct encoding a payload may comprise a selectable marker including, but not limited to, β-lactamase, luciferase, β-galactosidase, or any other reporter gene as that term is understood in the art, including cell-surface markers, such as CD4 or the truncated nerve growth factor (NGFR) (for GFP, see WO 96/23810; Heim et al., Current Biology 2:178-182 (1996); Heim et al., Proc. Natl. Acad. Sci. USA (1995); or Heim et al., Science 373:663-664 (1995); for β-lactamase, see WO 96/30540). In some embodiments, a nucleic acid encoding a selectable marker may comprise a fluorescent protein. A fluorescent protein as herein described may comprise any fluorescent marker including but not limited to green, yellow, and/or red fluorescent protein (GFP, YFP, and/or RFP).

[0079] In some embodiments, a payload construct encoding a payload may comprise a CRISPR regulatable element within the open reading frame in addition to the payload. As a non-limiting example, the CRISPR regulatable element may be a DNA binding domain, a transactivating factor for cas9 or a DNA binding domain coupled to a transactivating factor for cas9. The DNA binding domain may be coupled to the transactivating factor using any methods known in the art or described herein.

[0080] In one embodiment the DNA binding domain for the cas9 promoter and/or a transactivating factor for cas9 may be located within the sequence encoding the VP2 capsid. As a non-limiting example, the promoter and/or transactiving factor may be located within the first 1%, 2%, 3%, 4%, 5%, 6%, 7%, 8%, 9%, 10%, 15%, 20%, 25%, 30%, 35%, 40%, 45%, 46%, 47%, 48,% or 49% of the VP2 capsid. As another non-limiting example, the promoter and/or transactiving factor may be located within the last 1%, 2%, 3%, 4%, 5%, 6%, 7%, 8%, 9%, 10%, 15%, 20%, 25%, 30%, 35%, 40%, 45%, 46%, 47%, 48,% or 49% of the VP2 capsid. As a non-limiting example, the promoter and/or transactivating factor may be located in the middle of the VP2 capsid. As another non-limiting example, the promoter and/or transactiving factor may be located near the beginning of the VP2 capsid. As yet another non-limiting example, the promoter and/or transactiving factor may be located near the end of the VP2 capsid.

[0081] In accordance with the invention, a payload comprising a nucleic acid for expression in a target cell will be incorporated into the viral particle produced in the viral replication cell where the payload is located between two ITR sequences, or is located on either side of an asymmetrical ITR engineered with two D regions.

[0082] A CRISPR-AAV payload construct encoding one or more payloads for expression in a target cell may comprise one or more payload or non-payload nucleotide sequences operably linked to at least one target cell-compatible promoter. A person skilled in the art may recognize that a target cell may require a specific promoter including but not limited to a promoter that is species specific, inducible, tissue-specific, or cell cycle-specific Parr et al., Nat. Med. 3:1145-9 (1997).

### Viral Production

[0083] The present disclosure provides a method for the generation of parvoviral particles, e.g. CRISPR-AAV particles, by viral genome replication in a viral replication cell comprising contacting the viral replication cell with an AAV polynucleotide or AAV genome.

[0084] The present disclosure provides a method for producing a CRISPR-AAV particle having enhanced (increased, improved) transduction efficiency comprising the steps of: 1) co-transfecting competent bacterial cells with a bacmid vector and either a viral construct vector and/or CRISPR-AAV payload construct vector, 2) isolating the resultant viral construct expression vector and CRISPR-AAV payload construct expression vector and separately transfecting viral replication cells, 3) isolating and purifying resultant payload and viral construct particles comprising viral construct expression vector or CRISPR-AAV payload construct expression vector, 4) co-infecting a viral replication cell with both the CRISPR-AAV payload and viral construct particles comprising viral construct expression vector or CRISPR-AAV payload construct expression vector, 5) harvesting and purifying the viral particle comprising a CRISPR-parvoviral genome.

### Vectors and Capsids

[0085] The invention also provides nucleic acids encoding the mutated or modified virus capsids and capsid proteins of the invention. In some embodiments the capsids are engineered according to the methods of co-owned and co-pending application U.S. 62/009,430 filed Jun. 9, 2014, the contents of which are incorporated herein by reference in their entirety and methods known in the art.

[0086] Further provided are vectors comprising the nucleic acids, and cells (in vivo or in culture) comprising the nucleic acids and/or vectors of the invention. Suitable vectors include without limitation viral vectors (e.g., adenovirus, AAV, herpes virus, vaccinia, poxviruses, baculoviruses, and the like), plasmids, phage, YACs, BACs, and the like as are well known in the art. Such nucleic acids, vectors and cells can be used, for example, as reagents (e.g., helper packaging constructs or packaging cells) for the production of modified virus capsids or virus vectors as described herein.

[0087] The molecules of the invention which contain AAV sequences include any genetic element (vector) which may be delivered to a host cell, e.g., naked DNA, a plasmid, phage, transposon, cosmid, episome, a protein in a non-viral delivery vehicle (e.g., a lipid-based carrier), virus, etc., which transfers the sequences carried thereon. The selected vector may be delivered by any suitable method, including transfection, electroporation, liposome delivery, membrane fusion techniques, high velocity DNA-coated pellets, viral infection and protoplast fusion. The methods used to construct any embodiment of this invention are known to those with skill in nucleic acid manipulation and include genetic engineering, recombinant engineering, and synthetic techniques. See, e.g., Sambrook et al, Molecular Cloning: A Laboratory Manual, Cold Spring Harbor Press, Cold Spring Harbor, N.Y.

[0088] The transgene or payload can be carried on any suitable vector, e.g., a plasmid, which is delivered to a host cell. The plasmids useful in this invention may be engineered such that they are suitable for replication and, optionally, integration in prokaryotic cells, mammalian cells, or both. These plasmids contain sequences permitting replication of the transgene in eukaryotes and/or prokaryotes and selection markers for these systems. Selectable markers or reporter genes may include sequences encoding geneticin, hygromicin or purimycin resistance, among others. The plasmids may also contain certain selectable reporters or marker genes that can be used to signal the presence of the vector in bacterial cells, such as ampicillin resistance. Other components of the plasmid may include an origin of replication and an amplicon, such as the amplicon system employing the Epstein Barr virus nuclear antigen. This amplicon system, or other similar amplicon components permit high copy episomal replication in the cells. Preferably, the molecule carrying the transgene or payload is transfected into the cell, where it may exist transiently. Alternatively, the transgene may be stably integrated into the genome of the host cell, either chromosomally or as an episome. In certain embodiments, the transgene may be present in multiple copies, optionally in head-to-head, head-to-tail, or tail-to-tail concatamers. Suitable transfection techniques are known and may readily be utilized to deliver the transgene to the host cell.

### Cells

[0089] The present disclosure provides a cell comprising a CRISPR-AAV polynucleotide and/or CRISPR-AAV genome.

[0090] Viral production of the invention disclosed herein describes processes and methods for producing CRISPR-AAV particles that contact a target cell to deliver a payload construct, e.g. a recombinant viral construct, which comprises a nucleotide encoding a payload molecule.

[0091] In one embodiment, the CRISPR-AAV particles of the invention may be produced in a viral replication cell that comprises an insect cell.

[0092] Growing conditions for insect cells in culture, and production of heterologous products in insect cells in culture are well-known in the art, see U.S. Pat. No. 6,204,059, the contents of which are herein incorporated by reference in their entirety.

[0093] Any insect cell which allows for replication of parvovirus and which can be maintained in culture can be used in accordance with the present invention. Cell lines may be used from Spodoptera frugiperda, including, but not limited to the Sf9 or Sf21 cell lines, drosophila cell lines, or mosquito cell lines, such as Aedes albopictus derived cell lines. Use of insect cells for expression of heterologous proteins is well documented, as are methods of introducing nucleic acids, such as vectors, e.g., insect-cell compatible vectors, into such cells and methods of maintaining such cells in culture. See, for example, METHODS IN MOLECULAR BIOLOGY, ed. Richard, Humana Press, N J (1995); O'Reilly et al., BACULOVIRUS EXPRESSION VECTORS, A LABORATORY MANUAL, Oxford Univ. Press (1994); Samulski et al., J. Vir. 63:3822-8 (1989); Kajigaya et al., Proc. Nat'l. Acad. Sci. USA 88: 4646-50 (1991); Ruffing et al., J. Vir. 66:6922-30 (1992); Kimbauer et al., Vir. 219:37-44 (1996); Zhao et al., Vir. 272:382-93 (2000); and Samulski et al., U.S. Pat. No. 6,204,059, the contents of each of which are herein incorporated by reference in their entirety.

[0094] The viral replication cell may be selected from any biological organism, including prokaryotic (e.g., bacterial) cells, and eukaryotic cells, including, insect cells, yeast cells and mammalian cells. Viral replication cells may comprise mammalian cells such as HEK293, A549, WEH1, 3T3, 10T1/2, BHK, MDCK, COS 1, COS 7, BSC 1, BSC 40, BMT 10, VERO. W138, HeLa, 293, Saos, C2C12, L cells, HT1080, HepG2 and primary fibroblast, hepatocyte and myoblast cells derived from mammals. Viral replication cells of the invention comprise cells derived from mammalian species including, but not limited to, human, monkey, mouse, rat, rabbit, and hamster or cell type, including but not limited to fibroblast, hepatocyte, tumor cell, cell line transformed cell, etc.

### Small Scale Production of CRISPR-AAV Particles

[0095] Viral production of the invention disclosed herein describes processes and methods for producing CRISPR-AAV particles that contact a target cell to deliver a payload, e.g. a recombinant viral construct, which comprises a nucleotide encoding a payload.

[0096] In one embodiment, the CRISPR-AAV particles of the invention may be produced in a viral replication cell that comprises a mammalian cell.

[0097] Viral replication cells commonly used for production of recombinant AAV particles include, but is not limited to 293 cells, COS cells, HeLa cells, KB cells, and other mammalian cell lines as described in U.S. Pat. Nos. 6,156,303, 5,387,484, 5,741,683, 5,691,176, and 5,688,676; U.S. patent application 2002/0081721, and International Patent Applications WO 00/47757, WO 00/24916, and WO 96/17947, the contents of each of which are herein incorporated by reference in their entireties.

[0098] In one embodiment, CRISPR-AAV particles are produced in mammalian-cells wherein all three VP proteins are expressed at a stoichiometry approaching 1:1:10 (VP1:VP2:VP3). The regulatory mechanisms that allow this controlled level of expression include the production of two mRNAs, one for VP1, and the other for VP2 and VP3, produced by differential splicing.

[0099] In one embodiment the VP2 capsid may comprise a DNA binding domain for the cas9 promoter and/or a transactivating factor for cas9. The transactivating factor may be pre-engineered to induce cas9 expression.

[0100] In one embodiment, the expression of cas9 with a VP2 capsid comprising a DNA binding domain for the cas9 promoter and/or a transactivating factor for cas9 may be consistent over a period of time. The expression may be consistent for minutes (e.g., 1, 2, 3, 4, 5, 6, 7, 8, 9, 10, 15, 20, 25, 30, 35, 40, 45, 50, 55, or more than 55 minutes), hours (e.g., 1, 2, 3, 4, 5, 6, 7, 8, 9, 10, 11, 12, 13, 14, 15, 16, 17, 18, 19, 20, 21, 22, 23 or more than 24 hours), days (e.g., 1, 2, 3, 4, 5, 6, 7, 8, 9, 10, 11, 12, 13, 14, 15, 16, 17, 18, 19, 20 or more than 20 days), weeks (e.g., 1, 2, 3, 4, 5, 6, 7, 8, 9, 10 or more than 10 weeks), or months (e.g., 1, 2, 3, 4, 5, 6, 7, 8, 9, 10, 11, or more than 11 months). As another non-limiting example, expression of cas9 may be a burst of expression for a predetermined period of time (e.g., burst of expression for one hours, two hours, three hours, four hours, five hours, six hours or greater than six hours after administration).

[0101] In one embodiment, the promoter and/or transactiving factor may be located within the first 1%, 2%, 3%, 4%, 5%, 6%, 7%, 8%, 9%, 10%, 15%, 20%, 25%, 30%, 35%, 40%, 45%, 46%, 47%, 48,% or 49% of the VP2 capsid. In another embodiment, the promoter and/or transactiving factor may be located within the last 1%, 2%, 3%, 4%, 5%, 6%, 7%, 8%, 9%, 10%, 15%, 20%, 25%, 30%, 35%, 40%, 45%, 46%, 47%, 48,% or 49% of the VP2 capsid. In another embodiment, the promoter and/or transactivating factor may be located in the middle of the VP2 capsid. In another embodiment, the promoter and/or transactiving factor may be located near the beginning of the VP2 capsid. In another embodiment, the promoter and/or transactiving factor may be located near the end of the VP2 capsid.

[0102] In another embodiment, CRISPR-AAV particles are produced in mammalian cells using a triple transfection method wherein a payload construct, parvoviral Rep, and parvoviral Cap are comprised within three different constructs. The triple transfection method of the three components of AAV particle production may be utilized to produce small lots of virus for assays including transduction efficiency, target tissue (tropism) evaluation, and stability.

### Baculovirus

[0103] Particle production of the invention disclosed herein describes processes and methods for producing CRISPR-AAV particles that contact a target cell to deliver a payload construct which comprises a nucleotide encoding a payload.

[0104] Briefly, the viral construct vector and the CRISPR-AAV payload construct vector of the invention are each incorporated by a transposon donor/acceptor system into a bacmid, also known as a baculovirus plasmid, by standard molecular biology techniques known and performed by a person skilled in the art. Transfection of separate viral replication cell populations produces two baculoviruses, one that comprises the viral construct expression vector, and another that comprises the CRISPR-AAV payload construct expression vector. The two baculoviruses may be used to infect a single viral replication cell population for production of CRISPR-AAV particles.

[0105] Baculovirus expression vectors for producing viral particles in insect cells, including but not limited to Spodoptera frugiperda (Sf9) cells, provide high titers of viral particle product. Recombinant baculovirus encoding the viral construct expression vector and CRISPR-AAV payload construct expression vector initiates a productive infection of viral replicating cells. Infectious baculovirus particles released from the primary infection secondarily infect additional cells in the culture, exponentially infecting the entire cell culture population in a number of infection cycles that is a function of the initial multiplicity of infection, see Urabe, M. et al. J Virol. 2006 February; 80 (4):1874-85, the contents of which are herein incorporated by reference in their entirety.

[0106] Production of CRISPR-AAV particles with baculovirus in an insect cell system may address known baculovirus genetic and physical instability. In one embodiment, the production system of the invention addresses baculovirus instability over multiple passages by utilizing a titerless infected-cells preservation and scale-up system. Small scale seed cultures of viral producing cells are transfected with viral expression constructs encoding the structural, non-structural, components of the viral particle. Baculovirus-infected viral producing cells are harvested into aliquots that may be cryopreserved in liquid nitrogen; the aliquots retain viability and infectivity for infection of large scale viral producing cell culture Wasilko D J et al. Protein Expr Purif. 2009 June; 65(2):122-32, the contents of which are herein incorporated by reference in their entirety.

[0107] A genetically stable baculovirus may be used to produce source of the one or more of the components for producing CRISPR-AAV particles in invertebrate cells. In one embodiment, defective baculovirus expression vectors may be maintained episomally in insect cells. In such an embodiment the bacmid vector is engineered with replication control elements, including but not limited to promoters, enhancers, and/or cell-cycle regulated replication elements.

[0108] In one embodiment, baculoviruses may be engineered with a (non-) selectable marker for recombination into the chitinase/cathepsin locus. The chia/v-cath locus is non-essential for propagating baculovirus in tissue culture, and the V-cath (EC 3.4.22.50) is a cysteine endoprotease that is most active on Arg-Arg dipeptide containing substrates. The Arg-Arg dipeptide is present in densovirus and parvovirus capsid structural proteins but infrequently occurs in dependovirus VP1.

[0109] In one embodiment, stable viral replication cells permissive for baculovirus infection are engineered with at least one stable integrated copy of any of the elements necessary for AAV replication and viral particle production including, but not limited to, the entire AAV genome, Rep and Cap genes, Rep genes, Cap genes, each Rep protein as a separate transcription cassette, each VP protein as a separate transcription cassette, the AAP (assembly activation protein), or at least one of the baculovirus helper genes with native or non-native promoters.

### Large-Scale Production

[0110] In some embodiments, CRISPR-AAV particle production may be modified to increase the scale of production. Large scale viral production methods according to the present invention may include any of those taught in U.S. Pat. Nos. 5,756,283, 6,258,595, 6,261,551, 6,270,996, 6,281,010, 6,365,394, 6,475,769, 6,482,634, 6,485,966, 6,943,019, 6,953,690, 7,022,519, 7,238,526, 7,291,498 and 7,491,508 or International Publication Nos. WO1996039530, WO1998010088, WO1999014354, WO1999015685, WO1999047691, WO2000055342, WO2000075353 and WO2001023597, the contents of each of which are herein incorporated by reference by reference in their entirety. Methods of increasing viral particle production scale typically comprise increasing the number of viral replication cells. In some embodiments, viral replication cells comprise adherent cells. To increase the scale of viral particle production by adherent viral replication cells, larger cell culture surfaces are required. In some cases, large-scale production methods comprise the use of roller bottles to increase cell culture surfaces. Other cell culture substrates with increased surface areas are known in the art. Examples of additional adherent cell culture products with increased surface areas include, but are not limited to CELLSTACK®, CELLCUBE® (Corning Corp., Corning, N.Y.) and NUNC™ CELL FACTORY™ (Thermo Scientific, Waltham, Mass.) In some cases, large-scale adherent cell surfaces may comprise from about 1,000 cm² to about 100,000 cm². In some cases, large-scale adherent cell cultures may comprise from about 10⁷ to about 10⁹ cells, from about 10⁸ to about 10¹⁰ cells, from about 10⁹ to about 10¹² cells or at least 10¹² cells. In some cases, large-scale adherent cultures may produce from about 10⁹ to about 10¹², from about 10¹⁰ to about 10¹³, from about 10¹¹ to about 10¹⁴, from about 10¹² to about 10¹⁵ or at least 10¹⁵ viral particles.

[0111] In some embodiments, large-scale viral production methods of the present invention may comprise the use of suspension cell cultures. Suspension cell culture allows for significantly increased numbers of cells. Typically, the number of adherent cells that can be grown on about 10-50 cm² of surface area can be grown in about 1 cm³ volume in suspension.

[0112] Transfection of replication cells in large-scale culture formats may be carried out according to any methods known in the art. For large-scale adherent cell cultures, transfection methods may include, but are not limited to the use of inorganic compounds (e.g. calcium phosphate,) organic compounds [e.g. polyethylenimine (PEI)] or the use of non-chemical methods (e.g. electroporation.) With cells grown in suspension, transfection methods may include, but are not limited to the use of calcium phosphate and the use of PEI. In some cases, transfection of large scale suspension cultures may be carried out according to the section entitled “Transfection Procedure” described in Feng, L. et al., 2008. Biotechnol Appl. Biochem. 50:121-32, the contents of which are herein incorporated by reference in their entirety. According to such embodiments, PEI-DNA complexes may be formed for introduction of plasmids to be transfected. In some cases, cells being transfected with PEI-DNA complexes may be ‘shocked’ prior to transfection. This comprises lowering cell culture temperatures to 4° C. for a period of about 1 hour. In some cases, cell cultures may be shocked for a period of from about 10 minutes to about 5 hours. In some cases, cell cultures may be shocked at a temperature of from about 0° C. to about 20° C.

[0113] In some cases, transfections may include one or more vectors for expression of an RNA effector molecule to reduce expression of nucleic acids from one or more CRISPR-AAV payload construct. Such methods may enhance the production of viral particles by reducing cellular resources wasted on expressing payload constructs. In some cases, such methods may be carried according to those taught in US Publication No. US2014/0099666, the contents of which are herein incorporated by reference in their entirety.

### Bioreactors

[0114] In some embodiments, cell culture bioreactors may be used for large scale viral production. In some cases, bioreactors comprise stirred tank reactors. Such reactors generally comprise a vessel, typically cylindrical in shape, with a stirrer (e.g. impeller.) In some embodiments, such bioreactor vessels may be placed within a water jacket to control vessel temperature and/or to minimize effects from ambient temperature changes. Bioreactor vessel volume may range in size from about 500 ml to about 2 L, from about 1 L to about 5 L, from about 2.5 L to about 20 L, from about 10 L to about 50 L, from about 25 L to about 100 L, from about 75 L to about 500 L, from about 250 L to about 2,000 L, from about 1,000 L to about 10,000 L, from about 5,000 L to about 50,000 L or at least 50,000 L. Vessel bottoms may be rounded or flat. In some cases, animal cell cultures may be maintained in bioreactors with rounded vessel bottoms.

[0115] In some cases, bioreactor vessels may be warmed through the use of a thermocirculator. Thermocirculators pump heated water around water jackets. In some cases, heated water may be pumped through pipes (e.g. coiled pipes) that are present within bioreactor vessels. In some cases, warm air may be circulated around bioreactors, including, but not limited to air space directly above culture medium. Additionally, pH and CO₂ levels may be maintained to optimize cell viability.

[0116] In some cases, bioreactors may comprise hollow-fiber reactors. Hollow-fiber bioreactors may support the culture of both anchorage dependent and anchorage independent cells. Further bioreactors may include, but are not limited to packed-bed or fixed-bed bioreactors. Such bioreactors may comprise vessels with glass beads for adherent cell attachment. Further packed-bed reactors may comprise ceramic beads.

[0117] In some cases, viral particles are produced through the use of a disposable bioreactor. In some embodiments, such bioreactors may include WAVE™ disposable bioreactors.

[0118] In some embodiments, CRISPR-AAV particle production in animal cell bioreactor cultures may be carried out according to the methods taught in U.S. Pat. Nos. 5,064,764, 6,194,191, 6,566,118, 8,137,948 or US Patent Application No. US2011/0229971, the contents of each of which are herein incorporated by reference in their entirety.

### Cell Lysis

[0119] Cells of the invention, including, but not limited to viral production cells, may be subjected to cell lysis according to any methods known in the art. Cell lysis may be carried out to obtain one or more agents (e.g. viral particles) present within any cells of the invention. In some embodiments, cell lysis may be carried out according to any of the methods listed in U.S. Pat. Nos. 7,326,555, 7,579,181, 7,048,920, 6,410,300, 6,436,394, 7,732,129, 7,510,875, 7,445,930, 6,726,907, 6,194,191, 7,125,706, 6,995,006, 6,676,935, 7,968,333, 5,756,283, 6,258,595, 6,261,551, 6,270,996, 6,281,010, 6,365,394, 6,475,769, 6,482,634, 6,485,966, 6,943,019, 6,953,690, 7,022,519, 7,238,526, 7,291,498 and 7,491,508 or International Publication Nos. WO1996039530, WO1998010088, WO1999014354, WO1999015685, WO1999047691, WO2000055342, WO2000075353 and WO2001023597, the contents of each of which are herein incorporated by reference in their entirety. Cell lysis methods may be chemical or mechanical. Chemical cell lysis typically comprises contacting one or more cells with one or more lysis agent. Mechanical lysis typically comprises subjecting one or more cells to one or more lysis condition and/or one or more lysis force.

[0120] In some embodiments, chemical lysis may be used to lyse cells. As used herein, the term “lysis agent” refers to any agent that may aid in the disruption of a cell. In some cases, lysis agents are introduced in solutions, termed lysis solutions or lysis buffers. As used herein, the term “lysis solution” refers to a solution (typically aqueous) comprising one or more lysis agent. In addition to lysis agents, lysis solutions may include one or more buffering agents, solubilizing agents, surfactants, preservatives, cryoprotectants, enzymes, enzyme inhibitors and/or chelators. Lysis buffers are lysis solutions comprising one or more buffering agent. Additional components of lysis solutions may include one or more solubilizing agent. As used herein, the term “solubilizing agent” refers to a compound that enhances the solubility of one or more components of a solution and/or the solubility of one or more entities to which solutions are applied. In some cases, solubilizing agents enhance protein solubility. In some cases, solubilizing agents are selected based on their ability to enhance protein solubility while maintaining protein conformation and/or activity.

[0121] Exemplary lysis agents may include any of those described in U.S. Pat. Nos. 8,685,734, 7,901,921, 7,732,129, 7,223,585, 7,125,706, 8,236,495, 8,110,351, 7,419,956, 7,300,797, 6,699,706 and 6,143,567, the contents of each of which are herein incorporated by reference in their entirety. In some cases, lysis agents may be selected from lysis salts, amphoteric agents, cationic agents, ionic detergents and non-ionic detergents. Lysis salts may include, but are not limited to sodium chloride (NaCl) and potassium chloride (KCl.) Further lysis salts may include any of those described in U.S. Pat. Nos. 8,614,101, 7,326,555, 7,579,181, 7,048,920, 6,410,300, 6,436,394, 7,732,129, 7,510,875, 7,445,930, 6,726,907, 6,194,191, 7,125,706, 6,995,006, 6,676,935 and 7,968,333, the contents of each of which are herein incorporated by reference in their entirety. Concentrations of salts may be increased or decreased to obtain an effective concentration for rupture of cell membranes. Amphoteric agents, as referred to herein, are compounds capable of reacting as an acid or a base. Amphoteric agents may include, but are not limited to lysophosphatidylcholine, 3-((3-Cholamidopropyl) dimethylammonium)-1-propanesulfonate (CHAPS,) ZWITTERGENT® and the like. Cationic agents may include, but are not limited to cetyltrimethylammonium bromide (C (16) TAB) and Benzalkonium chloride. Lysis agents comprising detergents may include ionic detergents or non-ionic detergents. Detergents may function to break apart or dissolve cell structures including, but not limited to cell membranes, cell walls, lipids, carbohydrates, lipoproteins and glycoproteins. Exemplary ionic detergents include any of those taught in U.S. Pat. Nos. 7,625,570 and 6,593,123 or US Publication No. US2014/0087361, the contents of each of which are herein incorporated by reference in their entirety. Some ionic detergents may include, but are not limited to sodium dodecyl sulfate (SDS), cholate and deoxycholate. In some cases, ionic detergents may be included in lysis solutions as a solubilizing agent. Non-ionic detergents may include, but are not limited to octylglucoside, digitonin, lubrol, C12E8, TWEEN®-20, TWEEN®-80, Triton X-100 and Noniodet P-40. Non-ionic detergents are typically weaker lysis agents, but may be included as solubilizing agents for solubilizing cellular and/or viral proteins. Further lysis agents may include enzymes and urea. In some cases, one or more lysis agents may be combined in a lysis solution in order to enhance one or more of cell lysis and protein solubility. In some cases, enzyme inhibitors may be included in lysis solutions in order to prevent proteolysis that may be triggered by cell membrane disruption.

[0122] In some embodiments, mechanical cell lysis is carried out. Mechanical cell lysis methods may include the use of one or more lysis condition and/or one or more lysis force. As used herein, the term “lysis condition” refers to a state or circumstance that promotes cellular disruption. Lysis conditions may comprise certain temperatures, pressures, osmotic purity, salinity and the like. In some cases, lysis conditions comprise increased or decreased temperatures. According to some embodiments, lysis conditions comprise changes in temperature to promote cellular disruption. Cell lysis carried out according to such embodiments may include freeze-thaw lysis. As used herein, the term “freeze-thaw lysis” refers to cellular lysis in which a cell solution is subjected to one or more freeze-thaw cycle. According to freeze-thaw lysis methods, cells in solution are frozen to induce a mechanical disruption of cellular membranes caused by the formation and expansion of ice crystals. Cell solutions used according freeze-thaw lysis methods, may further comprise one or more lysis agents, solubilizing agents, buffering agents, cryoprotectants, surfactants, preservatives, enzymes, enzyme inhibitors and/or chelators. Once cell solutions subjected to freezing are thawed, such components may enhance the recovery of desired cellular products. In some cases, one or more cyroprotectants are included in cell solutions undergoing freeze-thaw lysis. As used herein, the term “cryoprotectant” refers to an agent used to protect one or more substance from damage due to freezing. Cryoprotectants of the invention may include any of those taught in US Publication No. US2013/0323302 or U.S. Pat. Nos. 6,503,888, 6,180,613, 7,888,096, 7,091,030, the contents of each of which are herein incorporated by reference in their entirety. In some cases, cryoprotectants may include, but are not limited to dimethyl sulfoxide, 1,2-propanediol, 2,3-butanediol, formamide, glycerol, ethylene glycol, 1,3-propanediol and n-dimethyl formamide, polyvinylpyrrolidone, hydroxyethyl starch, agarose, dextrans, inositol, glucose, hydroxyethylstarch, lactose, sorbitol, methyl glucose, sucrose and urea. In some embodiments, freeze-thaw lysis may be carried out according to any of the methods described in U.S. Pat. No. 7,704,721, the contents of which are herein incorporated by reference in their entirety.

[0123] As used herein, the term “lysis force” refers to a physical activity used to disrupt a cell. Lysis forces may include, but are not limited to mechanical forces, sonic forces, gravitational forces, optical forces, electrical forces and the like. Cell lysis carried out by mechanical force is referred to herein as “mechanical lysis.” Mechanical forces that may be used according to mechanical lysis may include high shear fluid forces. According to such methods of mechanical lysis, a microfluidizer may be used. Microfluidizers typically comprise an inlet reservoir where cell solutions may be applied. Cell solutions may then be pumped into an interaction chamber via a pump (e.g. high-pressure pump) at high speed and/or pressure to produce shear fluid forces. Resulting lysates may then be collected in one or more output reservoir. Pump speed and/or pressure may be adjusted to modulate cell lysis and enhance recovery of products (e.g. viral particles.) Other mechanical lysis methods may include physical disruption of cells by scraping.

[0124] Cell lysis methods may be selected based on the cell culture format of cells to be lysed. For example, with adherent cell cultures, some chemical and mechanical lysis methods may be used. Such mechanical lysis methods may include freeze-thaw lysis or scraping. In another example, chemical lysis of adherent cell cultures may be carried out through incubation with lysis solutions comprising surfactant, such as Triton-X-100. In some cases, cell lysates generated from adherent cell cultures may be treated with one more nuclease to lower the viscosity of the lysates caused by liberated DNA.

[0125] In one embodiment, a method for harvesting CRISPR-AAV particles without lysis may be used for efficient and scalable CRISPR-AAV particle production. In a non-limiting example, CRISPR-AAV particles may be produced by culturing a CRISPR-AAV particle lacking a heparin binding site, thereby allowing the CRISPR-AAV particle to pass into the supernatant, in a cell culture, collecting supernatant from the culture; and isolating the CRISPR-AAV particle from the supernatant, as described in US Patent Application 20090275107, the contents of which is incorporated herein by reference in its entirety.

### Clarification

[0126] Cell lysates comprising viral particles may be subjected to clarification. Clarification refers to initial steps taken in purification of viral particles from cell lysates. Clarification serves to prepare lysates for further purification by removing larger, insoluble debris. Clarification steps may include, but are not limited to centrifugation and filtration. During clarification, centrifugation may be carried out at low speeds to remove larger debris, only. Similarly, filtration may be carried out using filters with larger pore sizes so that only larger debris is removed. In some cases, tangential flow filtration may be used during clarification. Objectives of viral clarification include high throughput processing of cell lysates and to optimize ultimate viral recovery. Advantages of including a clarification step include scalability for processing of larger volumes of lysate. In some embodiments, clarification may be carried out according to any of the methods presented in U.S. Pat. Nos. 8,524,446, 5,756,283, 6,258,595, 6,261,551, 6,270,996, 6,281,010, 6,365,394, 6,475,769, 6,482,634, 6,485,966, 6,943,019, 6,953,690, 7,022,519, 7,238,526, 7,291,498, 7,491,508, US Publication Nos. US2013/0045186, US2011/0263027, US2011/0151434, US2003/0138772, and International Publication Nos. WO2002012455, WO1996039530, WO1998010088, WO1999014354, WO1999015685, WO1999047691, WO2000055342, WO2000075353 and WO2001023597, the contents of each of which are herein incorporated by reference in their entirety.

[0127] Methods of cell lysate clarification by filtration are well understood in the art and may be carried out according to a variety of available methods including, but not limited to passive filtration and flow filtration. Filters used may comprise a variety of materials and pore sizes. For example, cell lysate filters may comprise pore sizes of from about 1 μM to about 5 μM, from about 0.5 μM to about 2 μM, from about 0.1 μM to about 1 μM, from about 0.05 μM to about 0.05 μM and from about 0.001 μM to about 0.1 μM. Exemplary pore sizes for cell lysate filters may include, but are not limited to, 2.0, 1.9, 1.8, 1.7, 1.6, 1.5, 1.4, 1.3, 1.2, 1.1, 1, 0.9, 0.8, 0.7, 0.6, 0.5, 0.4, 0.3, 0.2, 0.1, 0.95, 0.9, 0.85, 0.8, 0.75, 0.7, 0.65, 0.6, 0.55, 0.5, 0.45, 0.4, 0.35, 0.3, 0.25, 0.2, 0.15, 0.1, 0.05, 0.22, 0.21, 0.20, 0.19, 0.18, 0.17, 0.16, 0.15, 0.14, 0.13, 0.12, 0.11, 0.1, 0.09, 0.08, 0.07, 0.06, 0.05, 0.04, 0.03, 0.02, 0.01, 0.02, 0.019, 0.018, 0.017, 0.016, 0.015, 0.014, 0.013, 0.012, 0.011, 0.01, 0.009, 0.008, 0.007, 0.006, 0.005, 0.004, 0.003, 0.002, 0.001 and 0.001 μM. In one embodiment, clarification may comprise filtration through a filter with 2.0 μM pore size to remove large debris, followed by passage through a filter with 0.45 μM pore size to remove intact cells.

[0128] Filter materials may be composed of a variety of materials. Such materials may include, but are not limited to polymeric materials and metal materials (e.g. sintered metal and pored aluminum.) Exemplary materials may include, but are not limited to nylon, cellulose materials (e.g. cellulose acetate), polyvinylidene fluoride (PVDF), polyethersulfone, polyamide, polysulfone, polypropylene, and polyethylene terephthalate. In some cases, filters useful for clarification of cell lysates may include, but are not limited to ULTIPLEAT PROFILE™ filters (Pall Corporation, Port Washington, N.Y.), SUPOR™ membrane filters (Pall Corporation, Port Washington, N.Y.)

[0129] In some cases, flow filtration may be carried out to increase filtration speed and/or effectiveness. In some cases, flow filtration may comprise vacuum filtration. According to such methods, a vacuum is created on the side of the filter opposite that of cell lysate to be filtered. In some cases, cell lysates may be passed through filters by centrifugal forces. In some cases, a pump is used to force cell lysate through clarification filters. Flow rate of cell lysate through one or more filters may be modulated by adjusting one of channel size and/or fluid pressure.

[0130] According to some embodiments, cell lysates may be clarified by centrifugation. Centrifugation may be used to pellet insoluble particles in the lysate. During clarification, centrifugation strength [expressed in terms of gravitational units (g), which represents multiples of standard gravitational force] may be lower than in subsequent purification steps. In some cases, centrifugation may be carried out on cell lysates at from about 200 g to about 800 g, from about 500 g to about 1500 g, from about 1000 g to about 5000 g, from about 1200 g to about 10000 g or from about 8000 g to about 15000 g. In some embodiments, cell lysate centrifugation is carried out at 8000 g for 15 minutes. In some cases, density gradient centrifugation may be carried out in order to partition particulates in the cell lysate by sedimentation rate. Gradients used according to methods of the present invention may include, but are not limited to cesium chloride gradients and iodixanol step gradients.

### Purification: Chromatography

[0131] In some cases, CRISPR-AAV particles may be purified from clarified cell lysates by one or more methods of chromatography. Chromatography refers to any number of methods known in the art for separating out one or more elements from a mixture. Such methods may include, but are not limited to ion exchange chromatography (e.g. cation exchange chromatography and anion exchange chromatography,) immunoaffinity chromatography and size-exclusion chromatography. In some embodiments, methods of viral chromatography may include any of those taught in U.S. Pat. Nos. 5,756,283, 6,258,595, 6,261,551, 6,270,996, 6,281,010, 6,365,394, 6,475,769, 6,482,634, 6,485,966, 6,943,019, 6,953,690, 7,022,519, 7,238,526, 7,291,498 and 7,491,508 or International Publication Nos. WO1996039530, WO1998010088, WO1999014354, WO1999015685, WO1999047691, WO2000055342, WO2000075353 and WO2001023597, the contents of each of which are herein incorporated by reference by reference in their entirety.

[0132] In some embodiments, ion exchange chromatography may be used to isolate viral particles. Ion exchange chromatography is used to bind viral particles based on charge-charge interactions between capsid proteins and charged sites present on a stationary phase, typically a column through which viral preparations (e.g. clarified lysates) are passed. After application of viral preparations, bound viral particles may then be eluted by applying an elution solution to disrupt the charge-charge interactions. Elution solutions may be optimized by adjusting salt concentration and/or pH to enhance recovery of bound viral particles. Depending on the charge of viral capsids being isolated, cation or anion exchange chromatography methods may be selected. Methods of ion exchange chromatography may include, but are not limited to any of those taught in U.S. Pat. Nos. 7,419,817, 6,143,548, 7,094,604, 6,593,123, 7,015,026 and 8,137,948, the contents of each of which are herein incorporated by reference in their entirety.

[0133] In some embodiments, immunoaffinity chromatography may be used. Immunoaffinity chromatography is a form of chromatography that utilizes one or more immune compounds (e.g. antibodies or antibody-related structures) to retain viral particles. Immune compounds may bind specifically to one or more structures on viral particle surfaces, including, but not limited to one or more viral coat protein. In some cases, immune compounds may be specific for a particular viral variant. In some cases, immune compounds may bind to multiple viral variants. In some embodiments, immune compounds may include recombinant single-chain antibodies. Such recombinant single chain antibodies may include those described in Smith, R. H. et al., 2009. Mol. Ther. 17(11):1888-96, the contents of which are herein incorporated by reference in their entirety. Such immune compounds are capable of binding to several AAV capsid variants, including, but not limited to AAV1, AAV2, AAV6 and AAV8.

[0134] In some embodiments, size-exclusion chromatography (SEC) may be used. SEC may comprise the use of a gel to separate particles according to size. In viral particle purification, SEC filtration is sometimes referred to as “polishing.” In some cases, SEC may be carried out to generate a final product that is near-homogenous. Such final products may in some cases be used in pre-clinical studies and/or clinical studies (Kotin, R. M. 2011. Human Molecular Genetics. 20(1):R2-R6, the contents of which are herein incorporated by reference in their entirety.) In some cases, SEC may be carried out according to any of the methods taught in U.S. Pat. Nos. 6,143,548, 7,015,026, 8,476,418, 6,410,300, 8,476,418, 7,419,817, 7,094,604, 6,593,123, and 8,137,948, the contents of each of which are herein incorporated by reference in their entirety.

[0135] In one embodiment, the compositions comprising at least one CRISPR-AAV particle may be isolated or purified using the methods described in U.S. Pat. No. 6,146,874, the contents of which are herein incorporated by reference in its entirety.

[0136] In one embodiment, the compositions comprising at least one CRISPR-AAV particle may be isolated or purified using the methods described in U.S. Pat. No. 6,660,514, the contents of which are herein incorporated by reference in its entirety.

[0137] In one embodiment, the compositions comprising at least one CRISPR-AAV particle may be isolated or purified using the methods described in U.S. Pat. No. 8,283,151, the contents of which are herein incorporated by reference in its entirety.

[0138] In one embodiment, the compositions comprising at least one CRISPR-AAV particle may be isolated or purified using the methods described in U.S. Pat. No. 8,524,446, the contents of which are herein incorporated by reference in its entirety.

### Gene Silencing: Knockdown Approach

[0139] When designed to inhibit or silence a gene, the CRISPR-AAV particles of the present invention may also comprise a viral genome that encodes a polynucleotide payload which may be processed to produce an siRNA, miRNA or other double stranded (ds) or single stranded (ss) gene modulatory motif.

[0140] Accordingly, the siRNA duplexes or dsRNA can be used to substantially inhibit gene expression in a cell, in particular cells of the CNS. In some aspects, the inhibition of gene expression refers to an inhibition by at least about 20%, preferably by at least about 30%, 40%, 50%, 60%, 70%, 80%, 85%, 90%, 95% and 100%. Accordingly, the protein product of the targeted gene may be inhibited by at least about 20%, preferably by at least about 30%, 40%, 50%, 60%, 70%, 80%, 85%, 90%, 95% and 100%. The gene can be either a wild type gene or a mutated gene with at least one mutation. Accordingly, the protein is either wild type protein or a mutated polypeptide with at least one mutation.

[0141] In some embodiments, the present invention provides methods for treating, or ameliorating a disease or condition associated with abnormal gene and/or protein in a subject in need of treatment, the method comprising administering to the subject an effective amount of at least one CRISPR-AAV particle comprising a viral genome encoding an siRNA duplex targeting the abnormal gene and/or protein, delivering duplex into targeted cells, inhibiting the gene expression and protein production, and ameliorating symptoms of the disease or condition in the subject.

### Gene Replacement or Activation

[0142] When designed to increase the expression of a gene or replace a gene, CRISPR-AAV particles may comprise a viral genome encoding a payload which encodes a normal gene to replace a mutated, defective or nonfunctional copy of that gene in the recipient.

### Treatment and Pharmaceutical Compositions

[0143] The present disclosure additionally provides a method for treating a disease, disorder and/or condition in a mammalian subject, including a human subject, comprising administering to the subject any of the CRISPR-AAV polynucleotides or CRISPR-AAV genomes described herein (i.e., viral genomes or “VG”) or administering to the subject a particle comprising the CRISPR-AAV polynucleotide or CRISPR-AAV genome, or administering to the subject any of the described compositions, including pharmaceutical compositions. In one embodiment, the disease, disorder and/or condition is a neurological disease, disorder and/or condition. In one embodiment, the neurological disease, disorder and/or condition is Parkinson's disease. In another embodiment, the neurological disease, disorder and/or condition is Friedreich's Ataxia. In another embodiment, the neurological disease, disorder and/or condition is Amyotrophic lateral sclerosis (ALS). In another embodiment, the neurological disease, disorder and/or condition is Huntington's disease. In another embodiment, the neurological disease, disorder or condition is spinal muscular atrophy (SMA). In another embodiment, the disease, disorder and/or condition is a muscular or cardiac disease, disorder and/or condition. In another embodiment, the disease, disorder and/or condition is an immune system disease, disorder and/or condition.

[0144] As used herein the term “composition” comprises a CRISPR-AAV polynucleotide or CRISPR-AAV genome or CRISPR-AAV particle and at least one excipient.

[0145] As used herein the term “pharmaceutical composition” comprises a CRISPR-AAV polynucleotide or CRISPR-AAV genome or CRISPR-AAV particle and one or more pharmaceutically acceptable excipients.

[0146] Although the descriptions of pharmaceutical compositions, e.g., those CRISPR-AAV particles comprising a payload to be delivered, provided herein are principally directed to pharmaceutical compositions which are suitable for administration to humans, it will be understood by the skilled artisan that such compositions are generally suitable for administration to any other animal, e.g., to non-human animals, e.g. non-human mammals. Modification of pharmaceutical compositions suitable for administration to humans in order to render the compositions suitable for administration to various animals is well understood, and the ordinarily skilled veterinary pharmacologist can design and/or perform such modification with merely ordinary, if any, experimentation. Subjects to which administration of the pharmaceutical compositions is contemplated include, but are not limited to, humans and/or other primates; mammals, including commercially relevant mammals such as cattle, pigs, horses, sheep, cats, dogs, mice, and/or rats; and/or birds, including commercially relevant birds such as poultry, chickens, ducks, geese, and/or turkeys.

[0147] In some embodiments, compositions are administered to humans, human patients or subjects. For the purposes of the present disclosure, the phrase “active ingredient” generally refers either to the viral particle carrying the payload or to the payload delivered by the viral particle as described herein.

[0148] Formulations of the CRISPR-AAV pharmaceutical compositions described herein may be prepared by any method known or hereafter developed in the art of pharmacology. In general, such preparatory methods include the step of bringing the active ingredient into association with an excipient and/or one or more other accessory ingredients, and then, if necessary and/or desirable, dividing, shaping and/or packaging the product into a desired single- or multi-dose unit.

[0149] Relative amounts of the active ingredient, the pharmaceutically acceptable excipient, and/or any additional ingredients in a pharmaceutical composition in accordance with the invention will vary, depending upon the identity, size, and/or condition of the subject treated and further depending upon the route by which the composition is to be administered.

### Formulation

[0150] The CRISPR-AAV particles of the invention can be formulated using one or more excipients to: (1) increase stability; (2) increase cell transfection or transduction; (3) permit the sustained or delayed release; (4) alter the biodistribution (e.g., target the viral particle to specific tissues or cell types); (5) increase the translation of encoded protein in vivo; (6) alter the release profile of encoded protein in vivo; (7) allow for regulatable expression of the payload and/or (8) allow for short-lived, transient, or burst-like expression of a CRISPR regulatable element (e.g., a cas9 element).

[0151] Formulations of the present invention can include, without limitation, saline, liposomes, lipid nanoparticles, polymers, lipoplexes, core-shell nanoparticles, peptides, proteins, cells transfected with viral vectors (e.g., for transplantation into a subject), nanoparticle mimics and combinations thereof.

[0152] Formulations of the pharmaceutical compositions described herein may be prepared by any method known or hereafter developed in the art of pharmacology. In general, such preparatory methods include the step of associating the active ingredient with an excipient and/or one or more other accessory ingredients.

[0153] A pharmaceutical composition in accordance with the present disclosure may be prepared, packaged, and/or sold in bulk, as a single unit dose, and/or as a plurality of single unit doses. As used herein, a “unit dose” refers to a discrete amount of the pharmaceutical composition comprising a predetermined amount of the active ingredient. The amount of the active ingredient is generally equal to the dosage of the active ingredient which would be administered to a subject and/or a convenient fraction of such a dosage such as, for example, one-half or one-third of such a dosage.

[0154] Relative amounts of the active ingredient (e.g. CRISPR-AAV), the pharmaceutically acceptable excipient, and/or any additional ingredients in a pharmaceutical composition in accordance with the present disclosure may vary, depending upon the identity, size, and/or condition of the subject being treated and further depending upon the route by which the composition is to be administered. For example, the composition may comprise between 0.1% and 99% (w/w) of the active ingredient. By way of example, the composition may comprise between 0.1% and 100%, e.g., between 0.5 and 50%, between 1-30%, between 5-80%, at least 80% (w/w) active ingredient.

[0155] In some embodiments, the CRISPR-AAV formulations described herein may contain at least one payload. As a non-limiting example, the formulations may contain 1, 2, 3, 4 or 5 payloads. In one embodiment the formulation may contain a payload encoding proteins selected from categories such as, but not limited to, human proteins, veterinary proteins, bacterial proteins, biological proteins, antibodies, immunogenic proteins, therapeutic peptides and proteins, secreted proteins, plasma membrane proteins, cytoplasmic and cytoskeletal proteins, intracellular membrane bound proteins, nuclear proteins, proteins associated with human disease and/or proteins associated with non-human diseases. In one embodiment, the formulation contains at least three CRISPR-AAV payload encoding proteins.

[0156] The formulations of the invention can include one or more excipients, each in an amount that together increases the stability of the CRISPR-AAV particle, increases cell transfection or transduction by the viral particle, increases the expression of viral polynucleotide encoded protein, and/or alters the release profile of CRISPR-AAV polynucleotide encoded proteins. In some embodiments, a pharmaceutically acceptable excipient may be at least 95%, at least 96%, at least 97%, at least 98%, at least 99%, or 100% pure. In some embodiments, an excipient is approved for use for humans and for veterinary use. In some embodiments, an excipient may be approved by United States Food and Drug Administration. In some embodiments, an excipient may be of pharmaceutical grade. In some embodiments, an excipient may meet the standards of the United States Pharmacopoeia (USP), the European Pharmacopoeia (EP), the British Pharmacopoeia, and/or the International Pharmacopoeia.

[0157] Excipients, as used herein, include, but are not limited to, any and all solvents, dispersion media, diluents, or other liquid vehicles, dispersion or suspension aids, surface active agents, isotonic agents, thickening or emulsifying agents, preservatives, and the like, as suited to the particular dosage form desired. Various excipients for formulating pharmaceutical compositions and techniques for preparing the composition are known in the art (see Remington: The Science and Practice of Pharmacy, 21st Edition, A. R. Gennaro, Lippincott, Williams & Wilkins, Baltimore, Md., 2006; incorporated herein by reference in its entirety). The use of a conventional excipient medium may be contemplated within the scope of the present disclosure, except insofar as any conventional excipient medium may be incompatible with a substance or its derivatives, such as by producing any undesirable biological effect or otherwise interacting in a deleterious manner with any other component(s) of the pharmaceutical composition.

### Inactive Ingredients

[0158] In some embodiments, CRISPR-AAV formulations may comprise at least one excipient which is an inactive ingredient. As used herein, the term “inactive ingredient” refers to one or more inactive agents included in formulations. In some embodiments, all, none or some of the inactive ingredients which may be used in the formulations of the present invention may be approved by the US Food and Drug Administration (FDA).

[0159] Formulations of CRISPR-AAV particles disclosed herein may include cations or anions. In one embodiment, the formulations include metal cations such as, but not limited to, Zn2+, Ca2+, Cu2+, Mg+ and combinations thereof.

### Administration

[0160] The CRISPR-AAV particles of the present invention may be administered by any route which results in a therapeutically effective outcome. These include, but are not limited to enteral (into the intestine), gastroenteral, epidural (into the dura mater), oral (by way of the mouth), transdermal, peridural, intracerebral (into the cerebrum), intracerebroventricular (into the cerebral ventricles), epicutaneous (application onto the skin), intradermal, (into the skin itself), subcutaneous (under the skin), nasal administration (through the nose), intravenous (into a vein), intravenous bolus, intravenous drip, intraarterial (into an artery), intramuscular (into a muscle), intracardiac (into the heart), intraosseous infusion (into the bone marrow), intrathecal (into the spinal canal), intraperitoneal, (infusion or injection into the peritoneum), intravesical infusion, intravitreal, (through the eye), intracavernous injection (into a pathologic cavity) intracavitary (into the base of the penis), intravaginal administration, intrauterine, extra-amniotic administration, transdermal (diffusion through the intact skin for systemic distribution), transmucosal (diffusion through a mucous membrane), transvaginal, insufflation (snorting), sublingual, sublabial, enema, eye drops (onto the conjunctiva), in ear drops, auricular (in or by way of the ear), buccal (directed toward the cheek), conjunctival, cutaneous, dental (to a tooth or teeth), electro-osmosis, endocervical, endosinusial, endotracheal, extracorporeal, hemodialysis, infiltration, interstitial, intra-abdominal, intra-amniotic, intra-articular, intrabiliary, intrabronchial, intrabursal, intracartilaginous (within a cartilage), intracaudal (within the cauda equine), intracisternal (within the cisterna magna cerebellomedularis), intracorneal (within the cornea), dental intracornal, intracoronary (within the coronary arteries), intracorporus cavernosum (within the dilatable spaces of the corporus cavernosa of the penis), intradiscal (within a disc), intraductal (within a duct of a gland), intraduodenal (within the duodenum), intradural (within or beneath the dura), intraepidermal (to the epidermis), intraesophageal (to the esophagus), intragastric (within the stomach), intragingival (within the gingivae), intraileal (within the distal portion of the small intestine), intralesional (within or introduced directly to a localized lesion), intraluminal (within a lumen of a tube), intralymphatic (within the lymph), intramedullary (within the marrow cavity of a bone), intrameningeal (within the meninges), intraocular (within the eye), intraovarian (within the ovary), intrapericardial (within the pericardium), intrapleural (within the pleura), intraprostatic (within the prostate gland), intrapulmonary (within the lungs or its bronchi), intrasinal (within the nasal or periorbital sinuses), intraspinal (within the vertebral column), intrasynovial (within the synovial cavity of a joint), intratendinous (within a tendon), intratesticular (within the testicle), intrathecal (within the cerebrospinal fluid at any level of the cerebrospinal axis), intrathoracic (within the thorax), intratubular (within the tubules of an organ), intratumor (within a tumor), intratympanic (within the aurus media), intravascular (within a vessel or vessels), intraventricular (within a ventricle), iontophoresis (by means of electric current where ions of soluble salts migrate into the tissues of the body), irrigation (to bathe or flush open wounds or body cavities), laryngeal (directly upon the larynx), nasogastric (through the nose and into the stomach), occlusive dressing technique (topical route administration which is then covered by a dressing which occludes the area), ophthalmic (to the external eye), oropharyngeal (directly to the mouth and pharynx), parenteral, percutaneous, periarticular, peridural, perineural, periodontal, rectal, respiratory (within the respiratory tract by inhaling orally or nasally for local or systemic effect), retrobulbar (behind the pons or behind the eyeball), soft tissue, subarachnoid, subconjunctival, submucosal, topical, transplacental (through or across the placenta), transtracheal (through the wall of the trachea), transtympanic (across or through the tympanic cavity), ureteral (to the ureter), urethral (to the urethra), vaginal, caudal block, diagnostic, nerve block, biliary perfusion, cardiac perfusion, photopheresis or spinal. In specific embodiments, compositions may be administered in a way which allows them cross the blood-brain barrier, vascular barrier, or other epithelial barrier. In one embodiment, a formulation for a route of administration may include at least one inactive ingredient.

### Dosing

[0161] The present invention provides methods of administering CRISPR-AAV particles and their payload or complexes in accordance with the invention to a subject in need thereof. CRISPR-AAV particle pharmaceutical, imaging, diagnostic, or prophylactic compositions thereof, may be administered to a subject using any amount and any route of administration effective for preventing, treating, diagnosing, or imaging a disease, disorder, and/or condition (e.g., a disease, disorder, and/or condition relating to working memory deficits). The exact amount required will vary from subject to subject, depending on the species, age, and general condition of the subject, the severity of the disease, the particular composition, its mode of administration, its mode of activity, and the like. Compositions in accordance with the invention are typically formulated in unit dosage form for ease of administration and uniformity of dosage. It will be understood, however, that the total daily usage of the compositions of the present invention may be decided by the attending physician within the scope of sound medical judgment. The specific therapeutically effective, prophylactically effective, or appropriate imaging dose level for any particular patient will depend upon a variety of factors including the disorder being treated and the severity of the disorder; the activity of the specific payload employed; the specific composition employed; the age, body weight, general health, sex and diet of the patient; the time of administration, route of administration, and rate of excretion of the specific payload employed; the duration of the treatment; drugs used in combination or coincidental with the specific payload employed; and like factors well known in the medical arts.

[0162] In certain embodiments, CRISPR-AAV particle pharmaceutical compositions in accordance with the present invention may be administered at dosage levels sufficient to deliver from about 0.0001 mg/kg to about 100 mg/kg, from about 0.001 mg/kg to about 0.05 mg/kg, from about 0.005 mg/kg to about 0.05 mg/kg, from about 0.001 mg/kg to about 0.005 mg/kg, from about 0.05 mg/kg to about 0.5 mg/kg, from about 0.01 mg/kg to about 50 mg/kg, from about 0.1 mg/kg to about 40 mg/kg, from about 0.5 mg/kg to about 30 mg/kg, from about 0.01 mg/kg to about 10 mg/kg, from about 0.1 mg/kg to about 10 mg/kg, or from about 1 mg/kg to about 25 mg/kg, of subject body weight per day, one or more times a day, to obtain the desired therapeutic, diagnostic, prophylactic, or imaging effect. It will be understood that the above dosing concentrations may be converted to vg or viral genomes per kg or into total viral genomes administered by one of skill in the art.

[0163] The desired dosage may be delivered three times a day, two times a day, once a day, every other day, every third day, every week, every two weeks, every three weeks, or every four weeks. In certain embodiments, the desired dosage may be delivered using multiple administrations (e.g., two, three, four, five, six, seven, eight, nine, ten, eleven, twelve, thirteen, fourteen, or more administrations). When multiple administrations are employed, split dosing regimens such as those described herein may be used. As used herein, a “split dose” is the division of single unit dose or total daily dose into two or more doses, e.g., two or more administrations of the single unit dose. As used herein, a “single unit dose” is a dose of any therapeutic administered in one dose/at one time/single route/single point of contact, i.e., single administration event. As used herein, a “total daily dose” is an amount given or prescribed in 24 hour period. It may be administered as a single unit dose. In one embodiment, the viral particles of the present invention are administered to a subject in split doses. The viral particles may be formulated in buffer only or in a formulation described herein.

[0164] A pharmaceutical composition described herein can be formulated into a dosage form described herein, such as a topical, intranasal, pulmonary, intratracheal, or injectable (e.g., intravenous, intraocular, intravitreal, intramuscular, intracardiac, intraperitoneal, and/or subcutaneous).

### Combinations

[0165] The CRISPR-AAV particles may be used in combination with one or more other therapeutic, prophylactic, diagnostic, or imaging agents. By “in combination with,” it is not intended to imply that the agents must be administered at the same time and/or formulated for delivery together, although these methods of delivery are within the scope of the present disclosure. Compositions can be administered concurrently with, prior to, or subsequent to, one or more other desired therapeutics or medical procedures. In general, each agent will be administered at a dose and/or on a time schedule determined for that agent. In some embodiments, the present disclosure encompasses the delivery of pharmaceutical, prophylactic, diagnostic, or imaging compositions in combination with agents that may improve their bioavailability, reduce and/or modify their metabolism, inhibit their excretion, and/or modify their distribution within the body.

### Delivery to Cells

[0166] The present disclosure provides a method of delivering to a cell or tissue any of the above-described CRISPR-AAV polynucleotides or CRISPR-AAV genomes, comprising contacting the cell or tissue with the CRISPR-AAV polynucleotide or CRISPR-AAV genomes or contacting the cell or tissue with a particle comprising the CRISPR-AAV polynucleotide or CRISPR-AAV genome, or contacting the cell or tissue with any of the described compositions, including pharmaceutical compositions. The method of delivering the CRISPR-AAV polynucleotide or CRISPR-AAV genome to a cell or tissue can be accomplished in vitro, ex vivo, or in vivo.

### Delivery to Subjects

[0167] The present disclosure additionally provides a method of delivering to a subject, including a mammalian subject, any of the above-described CRISPR-AAV polynucleotides or CRISPR-AAV genomes comprising administering to the subject the CRISPR-AAV polynucleotide or CRISPR-AAV genome, or administering to the subject a particle comprising the CRISPR-AAV polynucleotide or CRISPR-AAV genome, or administering to the subject any of the described compositions, including pharmaceutical compositions.

### Definitions

[0168] At various places in the present specification, substituents of compounds of the present disclosure are disclosed in groups or in ranges. It is specifically intended that the present disclosure include each and every individual sub-combination of the members of such groups and ranges. The following is a non-limiting list of term definitions.

[0169] Adeno-associated virus: The term “adeno-associated virus” or “AAV” as used herein refers to members of the dependovirus genus comprising any particle, sequence, gene, protein, or component derived therefrom. The term “AAV particle” as used herein comprises a capsid and a polynucleotide. The AAV particle may be derived from any serotype, described herein or known in the art, including combinations of serotypes (i.e., “pseudotyped” AAV) or from various genomes (e.g., single stranded or self-complementary). In addition, the AAV particle may be replication defective and/or targeted. Where CRISPR regulatable elements are present, the AAV is a CRISPR-AAV. The term “CRISPR-AAV particle” as used herein comprises a capsid, a polynucleotide, and one or more CRISPR regulatable elements, which may be encoded by the polynucleotide or extant to the polynucleotide.

[0170] Activity: As used herein, the term “activity” refers to the condition in which things are happening or being done. Compositions of the invention may have activity and this activity may involve one or more biological events.

[0171] Administered in combination: As used herein, the term “administered in combination” or “combined administration” refers to simultaneous exposure to two or more agents (e.g., CRISPR-AAV) administered at the same time or within an interval such that the subject is at some point in time simultaneously exposed to both and/or such that there may be an overlap in the effect of each agent on the patient. In some embodiments, at least one dose of one or more agents is administered within about 24 hours, 12 hours, 6 hours, 3 hours, 1 hour, 30 minutes, 15 minutes, 10 minutes, 5 minutes, or 1 minute of at least one dose of one or more other agents. In some embodiments, administration occurs in overlapping dosage regimens. As used herein, the term “dosage regimen” refers to a plurality of doses spaced apart in time. Such doses may occur at regular intervals or may include one or more hiatus in administration. In some embodiments, the administration of individual doses of one or more compounds and/or compositions of the present invention, as described herein, are spaced sufficiently closely together such that a combinatorial (e.g., a synergistic) effect is achieved.

[0172] Amelioration: As used herein, the term “amelioration” or “ameliorating” refers to a lessening of severity of at least one indicator of a condition or disease. For example, in the context of neurodegeneration disorder, amelioration includes the reduction of neuron loss.

[0173] Animal: As used herein, the term “animal” refers to any member of the animal kingdom. In some embodiments, “animal” refers to humans at any stage of development. In some embodiments, “animal” refers to non-human animals at any stage of development. In certain embodiments, the non-human animal is a mammal (e.g., a rodent, a mouse, a rat, a rabbit, a monkey, a dog, a cat, a sheep, cattle, a primate, or a pig). In some embodiments, animals include, but are not limited to, mammals, birds, reptiles, amphibians, fish, and worms. In some embodiments, the animal is a transgenic animal, genetically-engineered animal, or a clone.

[0174] Antisense strand: As used herein, the term “the antisense strand” or “the first strand” or “the guide strand” of a siRNA molecule refers to a strand that is substantially complementary to a section of about 10-50 nucleotides, e.g., about 15-30, 16-25, 18-23 or 19-22 nucleotides of the mRNA of the gene targeted for silencing. The antisense strand or first strand has sequence sufficiently complementary to the desired target mRNA sequence to direct target-specific silencing, e.g., complementarity sufficient to trigger the destruction of the desired target mRNA by the RNAi machinery or process.

[0175] Approximately: As used herein, the term “approximately” or “about,” as applied to one or more values of interest, refers to a value that is similar to a stated reference value. In certain embodiments, the term “approximately” or “about” refers to a range of values that fall within 25%, 20%, 19%, 18%, 17%, 16%, 15%, 14%, 13%, 12%, 11%, 10%, 9%, 8%, 7%, 6%, 5%, 4%, 3%, 2%, 1%, or less in either direction (greater than or less than) of the stated reference value unless otherwise stated or otherwise evident from the context (except where such number would exceed 100% of a possible value).

[0176] Associated with: As used herein, the terms “associated with,” “conjugated,” “linked,” “attached,” and “tethered,” when used with respect to two or more moieties, mean that the moieties are physically associated or connected with one another, either directly or via one or more additional moieties that serve as linking agents, to form a structure that is sufficiently stable so that the moieties remain physically associated under the conditions in which the structure is used, e.g., physiological conditions. An “association” need not be strictly through direct covalent chemical bonding. It may also suggest ionic or hydrogen bonding or a hybridization based connectivity sufficiently stable such that the “associated” entities remain physically associated.

[0177] Biomolecule: As used herein, the term “biomolecule” is any natural molecule which is amino acid-based, nucleic acid-based, carbohydrate-based or lipid-based, and the like.

[0178] Biologically active: As used herein, the phrase “biologically active” refers to a characteristic of any substance (e.g., a CRISPR-AAV) that has activity in or on a biological system and/or organism. For instance, a substance that, when administered to an organism, has a biological effect on that organism, is considered to be biologically active. In particular embodiments, a compounds and/or compositions of the present invention may be considered biologically active if even a portion of is biologically active or mimics an activity considered to biologically relevant.

[0179] Biological system: As used herein, the term “biological system” refers to a group of organs, tissues, cells, intracellular components, proteins, nucleic acids, molecules (including, but not limited to biomolecules) that function together to perform a certain biological task within cellular membranes, cellular compartments, cells, tissues, organs, organ systems, multicellular organisms, or any biological entity. In some embodiments, biological systems are cell signaling pathways comprising intracellular and/or extracellular cell signaling biomolecules. In some embodiments, biological systems comprise growth factor signaling events within the extracellular/cellular matrix and/or cellular niches.

[0180] Complementary and substantially complementary: As used herein, the term “complementary” refers to the ability of polynucleotides to form base pairs with one another. Base pairs are typically formed by hydrogen bonds between nucleotide units in antiparallel polynucleotide strands. Complementary polynucleotide strands can form base pair in the Watson-Crick manner (e.g., A to T, A to U, C to G), or in any other manner that allows for the formation of duplexes. As persons skilled in the art are aware, when using RNA as opposed to DNA, uracil rather than thymine is the base that is considered to be complementary to adenosine. However, when a U is denoted in the context of the present invention, the ability to substitute a T is implied, unless otherwise stated. Perfect complementarity or 100% complementarity refers to the situation in which each nucleotide unit of one polynucleotide strand can form hydrogen bond with a nucleotide unit of a second polynucleotide strand. Less than perfect complementarity refers to the situation in which some, but not all, nucleotide units of two strands can form hydrogen bond with each other. For example, for two 20-mers, if only two base pairs on each strand can form hydrogen bond with each other, the polynucleotide strands exhibit 10% complementarity. In the same example, if 18 base pairs on each strand can form hydrogen bonds with each other, the polynucleotide strands exhibit 90% complementarity. As used herein, the term “substantially complementary” means that the siRNA has a sequence (e.g., in the antisense strand) which is sufficient to bind the desired target mRNA, and to trigger the RNA silencing of the target mRNA.

[0181] Compound: As used herein, the term “compound,” refers to a distinct chemical entity. In some embodiments, a particular compound may exist in one or more isomeric or isotopic forms (including, but not limited to stereoisomers, geometric isomers and isotopes). In some embodiments, a compound is provided or utilized in only a single such form. In some embodiments, a compound is provided or utilized as a mixture of two or more such forms (including, but not limited to a racemic mixture of stereoisomers). Those of skill in the art appreciate that some compounds exist in different such forms, show different properties and/or activities (including, but not limited to biological activities). In such cases it is within the ordinary skill of those in the art to select or avoid particular forms of the compound for use in accordance with the present invention. For example, compounds that contain asymmetrically substituted carbon atoms can be isolated in optically active or racemic forms. Methods on how to prepare optically active forms from optically active starting materials are known in the art, such as by resolution of racemic mixtures or by stereoselective synthesis.

[0182] Conserved: As used herein, the term “conserved” refers to nucleotides or amino acid residues of polynucleotide or polypeptide sequences, respectively, that are those that occur unaltered in the same position of two or more sequences being compared. Nucleotides or amino acids that are relatively conserved are those that are conserved among more related sequences than nucleotides or amino acids appearing elsewhere in the sequences.

[0183] In some embodiments, two or more sequences are said to be “completely conserved” if they are 100% identical to one another. In some embodiments, two or more sequences are said to be “highly conserved” if they are at least 70% identical, at least 80% identical, at least 90% identical, or at least 95% identical to one another. In some embodiments, two or more sequences are said to be “highly conserved” if they are about 70% identical, about 80% identical, about 90% identical, about 95%, about 98%, or about 99% identical to one another. In some embodiments, two or more sequences are said to be “conserved” if they are at least 30% identical, at least 40% identical, at least 50% identical, at least 60% identical, at least 70% identical, at least 80% identical, at least 90% identical, or at least 95% identical to one another. In some embodiments, two or more sequences are said to be “conserved” if they are about 30% identical, about 40% identical, about 50% identical, about 60% identical, about 70% identical, about 80% identical, about 90% identical, about 95% identical, about 98% identical, or about 99% identical to one another. Conservation of sequence may apply to the entire length of an oligonucleotide or polypeptide or may apply to a portion, region or feature thereof.

[0184] In one embodiment, conserved sequences are not contiguous. Those skilled in the art are able to appreciate how to achieve alignment when gaps in contiguous alignment are present between sequences, and to align corresponding residues not withstanding insertions or deletions present.

[0185] Delivery: As used herein, “delivery” refers to the act or manner of delivering parvovirus, e.g. an AAV and/or CRISPR-AAV compound, substance, entity, moiety, cargo or payload to a target. Such target may be a cell, tissue, organ, organism, or system (whether biological or production).

[0186] Delivery Agent: As used herein, “delivery agent” refers to any agent which facilitates, at least in part, the delivery of one or more substances (including, but not limited to a compounds and/or compositions of the present invention, e.g., viral particles or expression vectors) to targeted cells.

[0187] Destabilized: As used herein, the term “destable,” “destabilize,” or “destabilizing region” means a region or molecule that is less stable than a starting, reference, wild-type or native form of the same region or molecule.

[0188] Detectable label: As used herein, “detectable label” refers to one or more markers, signals, or moieties which are attached, incorporated or associated with another entity, which markers, signals or moieties are readily detected by methods known in the art including radiography, fluorescence, chemiluminescence, enzymatic activity, absorbance, immunological detection and the like. Detectable labels may include radioisotopes, fluorophores, chromophores, enzymes, dyes, metal ions, ligands, biotin, avidin, streptavidin and haptens, quantum dots, polyhistidine tags, myc tags, flag tags, human influenza hemagglutinin (HA) tags and the like. Detectable labels may be located at any position in the entity with which they are attached, incorporated or associated. For example, when attached, incorporated in or associated with a peptide or protein, they may be within the amino acids, the peptides, or proteins, or located at the N- or C-termini.

[0189] Effective amount: As used herein, the term “effective amount” of an agent is that amount sufficient to effect beneficial or desired results, for example, upon single or multiple dose administration to a subject cell, in curing, alleviating, relieving or improving one or more symptoms of a disorder and, as such, an “effective amount” depends upon the context in which it is being applied. For example, in the context of administering an agent that treats ALS, an effective amount of an agent is, for example, an amount sufficient to achieve treatment, as defined herein, of ALS, as compared to the response obtained without administration of the agent.

[0190] Engineered: As used herein, embodiments of the invention are “engineered” when they are designed to have a feature or property, whether structural or chemical, that varies from a starting point, wild-type or native molecule. Thus, engineered agents or entities are those whose design and/or production include an act of the hand of man.

[0191] Epitope: As used herein, an “epitope” refers to a surface or region on a molecule that is capable of interacting with a biomolecule. For example a protein may contain one or more amino acids, e.g., an epitope, which interacts with an antibody, e.g., a biomolecule. In some embodiments, when referring to a protein or protein module, an epitope may comprise a linear stretch of amino acids or a three dimensional structure formed by folded amino acid chains.

[0192] Expression: As used herein, “expression” of a nucleic acid sequence refers to one or more of the following events: (1) production of an RNA template from a DNA sequence (e.g., by transcription); (2) processing of an RNA transcript (e.g., by splicing, editing, 5′ cap formation, and/or 3′ end processing); (3) translation of an RNA into a polypeptide or protein; (4) folding of a polypeptide or protein; and (5) post-translational modification of a polypeptide or protein.

[0193] Feature: As used herein, a “feature” refers to a characteristic, a property, or a distinctive element.

[0194] Formulation: As used herein, a “formulation” includes at least a compound and/or composition of the present invention (e.g., a vector, CRISPR-AAV particle, etc.) and a delivery agent.

[0195] Fragment: A “fragment,” as used herein, refers to a contiguous portion of a whole. For example, fragments of proteins may comprise polypeptides obtained by digesting full-length protein isolated from cultured cells. In some embodiments, a fragment of a protein includes at least 3, 4, 5, 6, 7, 8, 9, 10, 11, 12, 13, 14, 15, 16, 17, 18, 19, 20, 25, 30, 35, 40, 45, 50, 55, 60, 65, 70, 75, 80, 85, 90, 95, 100, 150, 200, 250 or more amino acids. In some embodiments, fragments of an antibody include portions of an antibody subjected to enzymatic digestion or synthesized as such.

[0196] Functional: As used herein, a “functional” biological molecule is a biological entity with a structure and in a form in which it exhibits a property and/or activity by which it is characterized.

[0197] Gene expression: The term “gene expression” refers to the process by which a nucleic acid sequence undergoes successful transcription and in most instances translation to produce a protein or peptide. For clarity, when reference is made to measurement of “gene expression”, this should be understood to mean that measurements may be of the nucleic acid product of transcription, e.g., RNA or mRNA or of the amino acid product of translation, e.g., polypeptides or peptides. Methods of measuring the amount or levels of RNA, mRNA, polypeptides and peptides are well known in the art.

[0198] Homology: As used herein, the term “homology” refers to the overall relatedness between polymeric molecules, e.g. between nucleic acid molecules (e.g. DNA molecules and/or RNA molecules) and/or between polypeptide molecules. In some embodiments, polymeric molecules are considered to be “homologous” to one another if their sequences are at least 25%, 30%, 35%, 40%, 45%, 50%, 55%, 60%, 65%, 70%, 75%, 80%, 85%, 90%, 95%, or 99% identical or similar. The term “homologous” necessarily refers to a comparison between at least two sequences (polynucleotide or polypeptide sequences). In accordance with the invention, two polynucleotide sequences are considered to be homologous if the polypeptides they encode are at least about 50%, 60%, 70%, 80%, 90%, 95%, or even 99% for at least one stretch of at least about 20 amino acids. In some embodiments, homologous polynucleotide sequences are characterized by the ability to encode a stretch of at least 4-5 uniquely specified amino acids. For polynucleotide sequences less than 60 nucleotides in length, homology is typically determined by the ability to encode a stretch of at least 4-5 uniquely specified amino acids. In accordance with the invention, two protein sequences are considered to be homologous if the proteins are at least about 50%, 60%, 70%, 80%, or 90% identical for at least one stretch of at least about 20 amino acids. In many embodiments, homologous protein may show a large overall degree of homology and a high degree of homology over at least one short stretch of at least 3, 4, 5, 6, 7, 8, 9, 10, 11, 12, 13, 14, 15, 16, 17, 18, 19, 20, 25, 30, 35, 40, 45, 50 or more amino acids. In many embodiments, homologous proteins share one or more characteristic sequence elements. As used herein, the term “characteristic sequence element” refers to a motif present in related proteins. In some embodiments, the presence of such motifs correlates with a particular activity (such as biological activity).

[0199] Identity: As used herein, the term “identity” refers to the overall relatedness between polymeric molecules, e.g., between oligonucleotide molecules (e.g. DNA molecules and/or RNA molecules) and/or between polypeptide molecules. Calculation of the percent identity of two polynucleotide sequences, for example, may be performed by aligning the two sequences for optimal comparison purposes (e.g., gaps can be introduced in one or both of a first and a second nucleic acid sequences for optimal alignment and non-identical sequences can be disregarded for comparison purposes). In certain embodiments, the length of a sequence aligned for comparison purposes is at least 30%, at least 40%, at least 50%, at least 60%, at least 70%, at least 80%, at least 90%, at least 95%, or 100% of the length of the reference sequence. The nucleotides at corresponding nucleotide positions are then compared. When a position in the first sequence is occupied by the same nucleotide as the corresponding position in the second sequence, then the molecules are identical at that position. The percent identity between the two sequences is a function of the number of identical positions shared by the sequences, taking into account the number of gaps, and the length of each gap, which needs to be introduced for optimal alignment of the two sequences. The comparison of sequences and determination of percent identity between two sequences can be accomplished using a mathematical algorithm. For example, the percent identity between two nucleotide sequences can be determined using methods such as those described in Computational Molecular Biology, Lesk, A. M., ed., Oxford University Press, New York, 1988; Biocomputing: Informatics and Genome Projects, Smith, D. W., ed., Academic Press, New York, 1993; Sequence Analysis in Molecular Biology, von Heinje, G., Academic Press, 1987; Computer Analysis of Sequence Data, Part I, Griffin, A. M., and Griffin, H. G., eds., Humana Press, New Jersey, 1994; and Sequence Analysis Primer, Gribskov, M. and Devereux, J., eds., M Stockton Press, New York, 1991; each of which is incorporated herein by reference. For example, the percent identity between two nucleotide sequences can be determined, for example using the algorithm of Meyers and Miller (CABIOS, 1989, 4:11-17), which has been incorporated into the ALIGN program (version 2.0) using a PAM120 weight residue table, a gap length penalty of 12 and a gap penalty of 4. The percent identity between two nucleotide sequences can, alternatively, be determined using the GAP program in the GCG software package using an NWSgapdna.CMP matrix. Methods commonly employed to determine percent identity between sequences include, but are not limited to those disclosed in Carillo, H., and Lipman, D., SIAM J Applied Math., 48:1073 (1988); incorporated herein by reference. Techniques for determining identity are codified in publicly available computer programs. Computer software to determine homology between two sequences include, but are not limited to, GCG program package, Devereux, J., et al., Nucleic Acids Research, 12(1), 387 (1984)), BLASTP, BLASTN, and FASTA Altschul, S. F. et al., J. Molec. Biol., 215, 403 (1990)).

[0200] Inhibit expression of a gene: As used herein, the phrase “inhibit expression of a gene” means to cause a reduction in the amount of an expression product of the gene. The expression product may be RNA transcribed from the gene (e.g. mRNA) or a polypeptide translated from mRNA transcribed from the gene. Typically a reduction in the level of mRNA results in a reduction in the level of a polypeptide translated therefrom. The level of expression may be determined using standard techniques for measuring mRNA or protein.

[0201] In vitro: As used herein, the term “in vitro” refers to events that occur in an artificial environment, e.g., in a test tube or reaction vessel, in cell culture, in a Petri dish, etc., rather than within an organism (e.g., animal, plant, or microbe).

[0202] In vivo: As used herein, the term “in vivo” refers to events that occur within an organism (e.g., animal, plant, or microbe or cell or tissue thereof).

[0203] Isolated: As used herein, the term “isolated” is synonymous with “separated”, but carries with it the inference separation was carried out by the hand of man. In one embodiment, an isolated substance or entity is one that has been separated from at least some of the components with which it was previously associated (whether in nature or in an experimental setting). Isolated substances may have varying levels of purity in reference to the substances from which they have been associated. Isolated substances and/or entities may be separated from at least about 10%, about 20%, about 30%, about 40%, about 50%, about 60%, about 70%, about 80%, about 90%, or more of the other components with which they were initially associated. In some embodiments, isolated agents are more than about 80%, about 85%, about 90%, about 91%, about 92%, about 93%, about 94%, about 95%, about 96%, about 97%, about 98%, about 99%, or more than about 99% pure. As used herein, a substance is “pure” if it is substantially free of other components.

[0204] Substantially isolated: By “substantially isolated” is meant that the compound is substantially separated from the environment in which it was formed or detected. Partial separation can include, for example, a composition enriched in the compound of the present disclosure. Substantial separation can include compositions containing at least about 50%, at least about 60%, at least about 70%, at least about 80%, at least about 90%, at least about 95%, at least about 97%, or at least about 99% by weight of the compound of the present disclosure, or salt thereof. Methods for isolating compounds and their salts are routine in the art. In some embodiments, isolation of a substance or entity includes disruption of chemical associations and/or bonds. In some embodiments, isolation includes only the separation from components with which the isolated substance or entity was previously combined and does not include such disruption.

[0205] Modified: As used herein, the term “modified” refers to a changed state or structure of a molecule or entity as compared with a parent or reference molecule or entity. Molecules may be modified in many ways including chemically, structurally, and functionally. In some embodiments, compounds and/or compositions of the present invention are modified by the introduction of non-natural amino acids, or non-natural nucleotides.

[0206] Mutation: As used herein, the term “mutation” refers to a change and/or alteration. In some embodiments, mutations may be changes and/or alterations to proteins (including peptides and polypeptides) and/or nucleic acids (including polynucleic acids). In some embodiments, mutations comprise changes and/or alterations to a protein and/or nucleic acid sequence. Such changes and/or alterations may comprise the addition, substitution and or deletion of one or more amino acids (in the case of proteins and/or peptides) and/or nucleotides (in the case of nucleic acids and or polynucleic acids). In embodiments wherein mutations comprise the addition and/or substitution of amino acids and/or nucleotides, such additions and/or substitutions may comprise 1 or more amino acid and/or nucleotide residues and may include modified amino acids and/or nucleotides.

[0207] Naturally occurring: As used herein, “naturally occurring” means existing in nature without artificial aid, or involvement of the hand of man.

[0208] Non-human vertebrate: As used herein, a “non-human vertebrate” includes all vertebrates except Homo sapiens, including wild and domesticated species. Examples of non-human vertebrates include, but are not limited to, mammals, such as alpaca, banteng, bison, camel, cat, cattle, deer, dog, donkey, gayal, goat, guinea pig, horse, llama, mule, pig, rabbit, reindeer, sheep water buffalo, and yak.

[0209] Nucleic acid: As used herein, the term “nucleic acid”, “polynucleotide” and ‘oligonucleotide” refer to any nucleic acid polymers composed of either polydeoxyribonucleotides (containing 2-deoxy-D-ribose), or polyribonucleotides (containing D-ribose), or any other type of polynucleotide which is an N glycoside of a purine or pyrimidine base, or modified purine or pyrimidine bases. There is no intended distinction in length between the term “nucleic acid”, “polynucleotide” and “oligonucleotide”, and these terms will be used interchangeably. These terms refer only to the primary structure of the molecule. Thus, these terms include double- and single-stranded DNA, as well as double- and single stranded RNA.

[0210] Off-target: As used herein, “off target” refers to any unintended effect on any one or more target, gene and/or cellular transcript.

[0211] Operably linked: As used herein, the phrase “operably linked” refers to a functional connection between two or more molecules, constructs, transcripts, entities, moieties or the like.

[0212] Particle: As used herein, a “particle” is a virus comprised of at least two components, a protein capsid and a polynucleotide sequence enclosed within the capsid.

[0213] Patient: As used herein, “patient” refers to a subject who may seek or be in need of treatment, requires treatment, is receiving treatment, will receive treatment, or a subject who is under care by a trained (e.g., licensed) professional for a particular disease or condition.

[0214] Payload: As used herein, “payload” refers to one or more polynucleotides or polynucleotide regions encoded by or within a viral genome or an expression product of such polynucleotide or polynucleotide region, e.g., a transgene, a polynucleotide encoding a polypeptide or multi-polypeptide or a modulatory nucleic acid or regulatory nucleic acid. Where CRISPR regulatable elements are encoded, the payload is a “CRISPR-AAV payload.”

[0215] Payload construct: As used herein, “payload construct” is one or more polynucleotide regions encoding or comprising a payload that is flanked on one or both sides by an inverted terminal repeat (ITR) sequence. The payload construct is a template that is replicated in a viral production cell to produce a viral genome. Where CRISPR regulatable elements are encoded, the payload construct is a “CRISPR-AAV payload construct.”

[0216] Payload construct vector: As used herein, “payload construct vector” is a vector encoding or comprising a payload construct, and regulatory regions for replication and expression in bacterial cells. Where CRISPR regulatable elements are encoded, the payload construct vector is a “CRISPR-AAV payload construct vector.”

[0217] Payload construct expression vector: As used herein, a “payload construct expression vector” is a vector encoding or comprising a payload construct and which further comprises one or more polynucleotide regions encoding or comprising components for viral expression in a viral replication cell. Where CRISPR regulatable elements are encoded, the payload construct expression vector is a “CRISPR-AAV payload construct expression vector.”

[0218] Peptide: As used herein, the term “peptide” refers to a chain of amino acids that is less than or equal to about 50 amino acids long, e.g., about 5, 10, 15, 20, 25, 30, 35, 40, 45, or 50 amino acids long.

[0219] Pharmaceutically acceptable: The phrase “pharmaceutically acceptable” is employed herein to refer to those compounds, materials, compositions, and/or dosage forms which are, within the scope of sound medical judgment, suitable for use in contact with the tissues of human beings and animals without excessive toxicity, irritation, allergic response, or other problem or complication, commensurate with a reasonable benefit/risk ratio.

[0220] Pharmaceutically acceptable excipients: As used herein, the term “pharmaceutically acceptable excipient,” as used herein, refers to any ingredient other than active agents (e.g., as described herein) present in pharmaceutical compositions and having the properties of being substantially nontoxic and non-inflammatory in subjects. In some embodiments, pharmaceutically acceptable excipients are vehicles capable of suspending and/or dissolving active agents. Excipients may include, for example: antiadherents, antioxidants, binders, coatings, compression aids, disintegrants, dyes (colors), emollients, emulsifiers, fillers (diluents), film formers or coatings, flavors, fragrances, glidants (flow enhancers), lubricants, preservatives, printing inks, sorbents, suspending or dispersing agents, sweeteners, and waters of hydration. Excipients include, but are not limited to: butylated hydroxytoluene (BHT), calcium carbonate, calcium phosphate (dibasic), calcium stearate, croscarmellose, cross-linked polyvinyl pyrrolidone, citric acid, crospovidone, cysteine, ethylcellulose, gelatin, hydroxypropyl cellulose, hydroxypropyl methylcellulose, lactose, magnesium stearate, maltitol, mannitol, methionine, methylcellulose, methyl paraben, microcrystalline cellulose, polyethylene glycol, polyvinyl pyrrolidone, povidone, pregelatinized starch, propyl paraben, retinyl palmitate, shellac, silicon dioxide, sodium carboxymethyl cellulose, sodium citrate, sodium starch glycolate, sorbitol, starch (corn), stearic acid, sucrose, talc, titanium dioxide, vitamin A, vitamin E, vitamin C, and xylitol.

[0221] Pharmaceutically acceptable salts: Pharmaceutically acceptable salts of the compounds described herein are forms of the disclosed compounds wherein the acid or base moiety is in its salt form (e.g., as generated by reacting a free base group with a suitable organic acid). Examples of pharmaceutically acceptable salts include, but are not limited to, mineral or organic acid salts of basic residues such as amines; alkali or organic salts of acidic residues such as carboxylic acids; and the like. Representative acid addition salts include acetate, adipate, alginate, ascorbate, aspartate, benzenesulfonate, benzoate, bisulfate, borate, butyrate, camphorate, camphorsulfonate, citrate, cyclopentanepropionate, digluconate, dodecylsulfate, ethanesulfonate, fumarate, glucoheptonate, glycerophosphate, hemisulfate, heptonate, hexanoate, hydrobromide, hydrochloride, hydroiodide, 2-hydroxy-ethanesulfonate, lactobionate, lactate, laurate, lauryl sulfate, malate, maleate, malonate, methanesulfonate, 2-naphthalenesulfonate, nicotinate, nitrate, oleate, oxalate, palmitate, pamoate, pectinate, persulfate, 3-phenylpropionate, phosphate, picrate, pivalate, propionate, stearate, succinate, sulfate, tartrate, thiocyanate, toluenesulfonate, undecanoate, valerate salts, and the like. Representative alkali or alkaline earth metal salts include sodium, lithium, potassium, calcium, magnesium, and the like, as well as nontoxic ammonium, quaternary ammonium, and amine cations, including, but not limited to ammonium, tetramethylammonium, tetraethylammonium, methylamine, dimethylamine, trimethylamine, triethylamine, ethylamine, and the like. Pharmaceutically acceptable salts include the conventional non-toxic salts, for example, from non-toxic inorganic or organic acids. In some embodiments a pharmaceutically acceptable salt is prepared from a parent compound which contains a basic or acidic moiety by conventional chemical methods. Generally, such salts can be prepared by reacting the free acid or base forms of these compounds with a stoichiometric amount of the appropriate base or acid in water or in an organic solvent, or in a mixture of the two; generally, nonaqueous media like ether, ethyl acetate, ethanol, isopropanol, or acetonitrile are preferred. Lists of suitable salts are found in Remington's Pharmaceutical Sciences, 17^{th} ed., Mack Publishing Company, Easton, Pa., 1985, p. 1418, Pharmaceutical Salts: Properties, Selection, and Use, P. H. Stahl and C. G. Wermuth (eds.), Wiley-VCH, 2008, and Berge et al., Journal of Pharmaceutical Science, 66, 1-19 (1977), each of which is incorporated herein by reference in its entirety. Pharmaceutically acceptable solvate: The term “pharmaceutically acceptable solvate,” as used herein, refers to a crystalline form of a compound wherein molecules of a suitable solvent are incorporated in the crystal lattice. For example, solvates may be prepared by crystallization, recrystallization, or precipitation from a solution that includes organic solvents, water, or a mixture thereof. Examples of suitable solvents are ethanol, water (for example, mono-, di-, and tri-hydrates), N-methylpyrrolidinone (NMP), dimethyl sulfoxide (DMSO), N,N′-dimethylformamide (DMF), N,N′-dimethylacetamide (DMAC), 1,3-dimethyl-2-imidazolidinone (DMEU), 1,3-dimethyl-3,4,5,6-tetrahydro-2-(1H)-pyrimidinone (DMPU), acetonitrile (ACN), propylene glycol, ethyl acetate, benzyl alcohol, 2-pyrrolidone, benzyl benzoate, and the like. When water is the solvent, the solvate is referred to as a “hydrate.” In some embodiments, the solvent incorporated into a solvate is of a type or at a level that is physiologically tolerable to an organism to which the solvate is administered (e.g., in a unit dosage form of a pharmaceutical composition).

[0222] Pharmacokinetic: As used herein, “pharmacokinetic” refers to any one or more properties of a molecule or compound as it relates to the determination of the fate of substances administered to living organisms. Pharmacokinetics are divided into several areas including the extent and rate of absorption, distribution, metabolism and excretion. This is commonly referred to as ADME where: (A) Absorption is the process of a substance entering the blood circulation; (D) Distribution is the dispersion or dissemination of substances throughout the fluids and tissues of the body; (M) Metabolism (or Biotransformation) is the irreversible transformation of parent compounds into daughter metabolites; and (E) Excretion (or Elimination) refers to the elimination of the substances from the body. In rare cases, some drugs irreversibly accumulate in body tissue.

[0223] Physicochemical: As used herein, “physicochemical” means of or relating to a physical and/or chemical property.

[0224] Preventing: As used herein, the term “preventing” refers to partially or completely delaying onset of an infection, disease, disorder and/or condition; partially or completely delaying onset of one or more symptoms, features, or clinical manifestations of a particular infection, disease, disorder, and/or condition; partially or completely delaying onset of one or more symptoms, features, or manifestations of a particular infection, disease, disorder, and/or condition; partially or completely delaying progression from an infection, a particular disease, disorder and/or condition; and/or decreasing the risk of developing pathology associated with the infection, the disease, disorder, and/or condition.

[0225] Proliferate: As used herein, the term “proliferate” means to grow, expand, replicate or increase or cause to grow, expand, replicate or increase. “Proliferative” means having the ability to proliferate. “Anti-proliferative” means having properties counter to or in opposition to proliferative properties.

[0226] Protein of interest: As used herein, the terms “proteins of interest” or “desired proteins” include those provided herein and fragments, mutants, variants, and alterations thereof.

[0227] Purified: As used herein, the term “purify” means to make substantially pure or clear from unwanted components, material defilement, admixture or imperfection. “Purified” refers to the state of being pure. “Purification” refers to the process of making pure.

[0228] Region: As used herein, the term “region” refers to a zone or general area. In some embodiments, when referring to a protein or protein module, a region may comprise a linear sequence of amino acids along the protein or protein module or may comprise a three dimensional area, an epitope and/or a cluster of epitopes. In some embodiments, regions comprise terminal regions. As used herein, the term “terminal region” refers to regions located at the ends or termini of a given agent. When referring to proteins, terminal regions may comprise N- and/or C-termini. N-termini refer to the end of a protein comprising an amino acid with a free amino group. C-termini refer to the end of a protein comprising an amino acid with a free carboxyl group. N- and/or C-terminal regions may there for comprise the N- and/or C-termini as well as surrounding amino acids. In some embodiments, N- and/or C-terminal regions comprise from about 3 amino acid to about 30 amino acids, from about 5 amino acids to about 40 amino acids, from about 10 amino acids to about 50 amino acids, from about 20 amino acids to about 100 amino acids and/or at least 100 amino acids. In some embodiments, N-terminal regions may comprise any length of amino acids that includes the N-terminus, but does not include the C-terminus. In some embodiments, C-terminal regions may comprise any length of amino acids, which include the C-terminus, but do not comprise the N-terminus.

[0229] In some embodiments, when referring to a polynucleotide, a region may comprise a linear sequence of nucleic acids along the polynucleotide or may comprise a three dimensional area, secondary structure, or tertiary structure. In some embodiments, regions comprise terminal regions. As used herein, the term “terminal region” refers to regions located at the ends or termini of a given agent. When referring to polynucleotides, terminal regions may comprise 5′ and 3′ termini. 5′ termini refer to the end of a polynucleotide comprising a nucleic acid with a free phosphate group. 3′ termini refer to the end of a polynucleotide comprising a nucleic acid with a free hydroxyl group. 5′ and 3′ regions may there for comprise the 5′ and 3′ termini as well as surrounding nucleic acids. In some embodiments, 5′ and 3′ terminal regions comprise from about 9 nucleic acids to about 90 nucleic acids, from about 15 nucleic acids to about 120 nucleic acids, from about 30 nucleic acids to about 150 nucleic acids, from about 60 nucleic acids to about 300 nucleic acids and/or at least 300 nucleic acids. In some embodiments, 5′ regions may comprise any length of nucleic acids that includes the 5′ terminus, but does not include the 3′ terminus. In some embodiments, 3′ regions may comprise any length of nucleic acids, which include the 3′ terminus, but does not comprise the 5′ terminus.

[0230] RNA or RNA molecule: As used herein, the term “RNA” or “RNA molecule” or “ribonucleic acid molecule” refers to a polymer of ribonucleotides; the term “DNA” or “DNA molecule” or “deoxyribonucleic acid molecule” refers to a polymer of deoxyribonucleotides. DNA and RNA can be synthesized naturally, e.g., by DNA replication and transcription of DNA, respectively; or be chemically synthesized. DNA and RNA can be single-stranded (i.e., ssRNA or ssDNA, respectively) or multi-stranded (e.g., double stranded, i.e., dsRNA and dsDNA, respectively). The term “mRNA” or “messenger RNA”, as used herein, refers to a single stranded RNA that encodes the amino acid sequence of one or more polypeptide chains.

[0231] RNA interference: As used herein, the term “RNA interference” or “RNAi” refers to a sequence specific regulatory mechanism mediated by RNA molecules which results in the inhibition or interference or “silencing” of the expression of a corresponding protein-coding gene.

[0232] Sample: As used herein, the term “sample” refers to an aliquot or portion taken from a source and/or provided for analysis or processing. In some embodiments, a sample is from a biological source such as a tissue, cell or component part (e.g. a body fluid, including but not limited to blood, mucus, lymphatic fluid, synovial fluid, cerebrospinal fluid, saliva, amniotic fluid, amniotic cord blood, urine, vaginal fluid and semen). In some embodiments, a sample may be or comprise a homogenate, lysate or extract prepared from a whole organism or a subset of its tissues, cells or component parts, or a fraction or portion thereof, including but not limited to, for example, plasma, serum, spinal fluid, lymph fluid, the external sections of the skin, respiratory, intestinal, and genitourinary tracts, tears, saliva, milk, blood cells, tumors, organs. In some embodiments, a sample is or comprises a medium, such as a nutrient broth or gel, which may contain cellular components, such as proteins or nucleic acid molecule. In some embodiments, a “primary” sample is an aliquot of the source. In some embodiments, a primary sample is subjected to one or more processing (e.g., separation, purification, etc.) steps to prepare a sample for analysis or other use.

[0233] Self-complementary viral particle: As used herein, a “self-complementary viral particle” is a particle comprised of at least two components, a protein capsid and a polynucleotide sequence encoding a self-complementary genome enclosed within the capsid.

[0234] Sense strand: As used herein, the term “the sense strand” or “the second strand” or “the passenger strand” of a siRNA molecule refers to a strand that is complementary to the antisense strand or first strand. The antisense and sense strands of a siRNA molecule are hybridized to form a duplex structure. As used herein, a “siRNA duplex” includes a siRNA strand having sufficient complementarity to a section of about 10-50 nucleotides of the mRNA of the gene targeted for silencing and a siRNA strand having sufficient complementarity to form a duplex with the siRNA strand.

[0235] Signal Sequences: As used herein, the phrase “signal sequences” refers to a sequence which can direct the transport or localization.

[0236] Single unit dose: As used herein, a “single unit dose” is a dose of any therapeutic administered in one dose/at one time/single route/single point of contact, i.e., single administration event. In some embodiments, a single unit dose is provided as a discrete dosage form (e.g., a tablet, capsule, patch, loaded syringe, vial, etc.).

[0237] Similarity: As used herein, the term “similarity” refers to the overall relatedness between polymeric molecules, e.g. between polynucleotide molecules (e.g. DNA molecules and/or RNA molecules) and/or between polypeptide molecules. Calculation of percent similarity of polymeric molecules to one another can be performed in the same manner as a calculation of percent identity, except that calculation of percent similarity takes into account conservative substitutions as is understood in the art.

[0238] Small/short interfering RNA: As used herein, the term “small/short interfering RNA” or “siRNA” refers to an RNA molecule (or RNA analog) comprising between about 5-60 nucleotides (or nucleotide analogs) which is capable of directing or mediating RNAi. Preferably, a siRNA molecule comprises between about 15-30 nucleotides or nucleotide analogs, more preferably between about 16-25 nucleotides (or nucleotide analogs), even more preferably between about 18-23 nucleotides (or nucleotide analogs), and even more preferably between about 19-22 nucleotides (or nucleotide analogs) (e.g., 19, 20, 21 or 22 nucleotides or nucleotide analogs). The term “short” siRNA refers to a siRNA comprising 5-23 nucleotides, preferably 21 nucleotides (or nucleotide analogs), for example, 19, 20, 21 or 22 nucleotides. The term “long” siRNA refers to a siRNA comprising 24-60 nucleotides, preferably about 24-25 nucleotides, for example, 23, 24, 25 or 26 nucleotides. Short siRNAs may, in some instances, include fewer than 19 nucleotides, e.g., 16, 17 or 18 nucleotides, or as few as 5 nucleotides, provided that the shorter siRNA retains the ability to mediate RNAi. Likewise, long siRNAs may, in some instances, include more than 26 nucleotides, e.g., 27, 28, 29, 30, 35, 40, 45, 50, 55, or even 60 nucleotides, provided that the longer siRNA retains the ability to mediate RNAi or translational repression absent further processing, e.g., enzymatic processing, to a short siRNA. siRNAs can be single stranded RNA molecules (ss-siRNAs) or double stranded RNA molecules (ds-siRNAs) comprising a sense strand and an antisense strand which hybridized to form a duplex structure called siRNA duplex.

[0239] Split dose: As used herein, a “split dose” is the division of single unit dose or total daily dose into two or more doses.

[0240] Stable: As used herein “stable” refers to a compound or entity that is sufficiently robust to survive isolation to a useful degree of purity from a reaction mixture, and preferably capable of formulation into an efficacious therapeutic agent.

[0241] Stabilized: As used herein, the term “stabilize”, “stabilized,” “stabilized region” means to make or become stable. In some embodiments, stability is measured relative to an absolute value. In some embodiments, stability is measured relative to a reference compound or entity.

[0242] Subject: As used herein, the term “subject” or “patient” refers to any organism to which a composition in accordance with the invention may be administered, e.g., for experimental, diagnostic, prophylactic, and/or therapeutic purposes. Typical subjects include animals (e.g., mammals such as mice, rats, rabbits, non-human primates, and humans) and/or plants.

[0243] Substantially: As used herein, the term “substantially” refers to the qualitative condition of exhibiting total or near-total extent or degree of a characteristic or property of interest. One of ordinary skill in the biological arts will understand that biological and chemical phenomena rarely, if ever, go to completion and/or proceed to completeness or achieve or avoid an absolute result. The term “substantially” is therefore used herein to capture the potential lack of completeness inherent in many biological and chemical phenomena.

[0244] Substantially equal: As used herein as it relates to time differences between doses, the term means plus/minus 2%.

[0245] Substantially simultaneously: As used herein and as it relates to plurality of doses, the term typically means within about 2 seconds.

[0246] Suffering from: An individual who is “suffering from” a disease, disorder, and/or condition has been diagnosed with or displays one or more symptoms of a disease, disorder, and/or condition.

[0247] Susceptible to: An individual who is “susceptible to” a disease, disorder, and/or condition has not been diagnosed with and/or may not exhibit symptoms of the disease, disorder, and/or condition but harbors a propensity to develop a disease or its symptoms. In some embodiments, an individual who is susceptible to a disease, disorder, and/or condition (for example, cancer) may be characterized by one or more of the following: (1) a genetic mutation associated with development of the disease, disorder, and/or condition; (2) a genetic polymorphism associated with development of the disease, disorder, and/or condition; (3) increased and/or decreased expression and/or activity of a protein and/or nucleic acid associated with the disease, disorder, and/or condition; (4) habits and/or lifestyles associated with development of the disease, disorder, and/or condition; (5) a family history of the disease, disorder, and/or condition; and (6) exposure to and/or infection with a microbe associated with development of the disease, disorder, and/or condition. In some embodiments, an individual who is susceptible to a disease, disorder, and/or condition will develop the disease, disorder, and/or condition. In some embodiments, an individual who is susceptible to a disease, disorder, and/or condition will not develop the disease, disorder, and/or condition.

[0248] Synthetic: The term “synthetic” means produced, prepared, and/or manufactured by the hand of man. Synthesis of polynucleotides or polypeptides or other molecules of the present invention may be chemical or enzymatic.

[0249] Targeting: As used herein, “targeting” means the process of design and selection of nucleic acid sequence that will hybridize to a target nucleic acid and induce a desired effect.

[0250] Targeted Cells: As used herein, “targeted cells” refers to any one or more cells of interest. The cells may be found in vitro, in vivo, in situ or in the tissue or organ of an organism. The organism may be an animal, preferably a mammal, more preferably a human and most preferably a patient.

[0251] Therapeutic Agent: The term “therapeutic agent” refers to any agent that, when administered to a subject has a therapeutic, diagnostic, and/or prophylactic effect and/or elicits a desired biological and/or pharmacological effect.

[0252] Therapeutically effective amount: As used herein, the term “therapeutically effective amount” means an amount of an agent to be delivered (e.g., nucleic acid, drug, therapeutic agent, diagnostic agent, prophylactic agent, etc.) that is sufficient, when administered to a subject suffering from or susceptible to an infection, disease, disorder, and/or condition, to treat, improve symptoms of, diagnose, prevent, and/or delay the onset of the infection, disease, disorder, and/or condition. In some embodiments, a therapeutically effective amount is provided in a single dose. In some embodiments, a therapeutically effective amount is administered in a dosage regimen comprising a plurality of doses. Those skilled in the art will appreciate that in some embodiments, a unit dosage form may be considered to comprise a therapeutically effective amount of a particular agent or entity if it comprises an amount that is effective when administered as part of such a dosage regimen.

[0253] Therapeutically effective outcome: As used herein, the term “therapeutically effective outcome” means an outcome that is sufficient in a subject suffering from or susceptible to an infection, disease, disorder, and/or condition, to treat, improve symptoms of, diagnose, prevent, and/or delay the onset of the infection, disease, disorder, and/or condition.

[0254] Total daily dose: As used herein, a “total daily dose” is an amount given or prescribed in a 24 hour period. It may be administered as a single unit dose.

[0255] Treating: As used herein, the term “treating” refers to partially or completely alleviating, ameliorating, improving, relieving, delaying onset of, inhibiting progression of, reducing severity of, and/or reducing incidence of one or more symptoms or features of a particular infection, disease, disorder, and/or condition. For example, “treating” cancer may refer to inhibiting survival, growth, and/or spread of a tumor. Treatment may be administered to a subject who does not exhibit signs of a disease, disorder, and/or condition and/or to a subject who exhibits only early signs of a disease, disorder, and/or condition for the purpose of decreasing the risk of developing pathology associated with the disease, disorder, and/or condition.

[0256] Unmodified: As used herein, “unmodified” refers to any substance, compound or molecule prior to being changed in any way. Unmodified may, but does not always, refer to the wild-type or native form of a biomolecule or entity. Molecules or entities may undergo a series of modifications whereby each modified product may serve as the “unmodified” starting molecule or entity for a subsequent modification.

[0257] Vector: As used herein, a “vector” is any molecule or moiety which transports, transduces or otherwise acts as a carrier of a heterologous molecule.

[0258] Vectors of the present invention may be produced recombinantly and may be based on and/or may comprise adeno-associated virus (AAV) parent or reference sequence. Such parent or reference AAV sequences may serve as an original, second, third or subsequent sequence for engineering vectors. In non-limiting examples, such parent or reference AAV sequences may comprise any one or more of the following sequences: a polynucleotide sequence encoding a polypeptide or multi-polypeptide, which sequence may be wild-type or modified from wild-type and which sequence may encode full-length or partial sequence of a protein, protein domain, or one or more subunits of a protein; a polynucleotide comprising a modulatory or regulatory nucleic acid which sequence may be wild-type or modified from wild-type; and a transgene that may or may not be modified from wild-type sequence. These AAV sequences may serve as either the “donor” sequence of one or more codons (at the nucleic acid level) or amino acids (at the polypeptide level) or “acceptor” sequences of one or more codons (at the nucleic acid level) or amino acids (at the polypeptide level).

[0259] Viral construct vector: As used herein, a “viral construct vector” is a vector which comprises one or more polynucleotide regions encoding or comprising Rep and or Cap protein.

[0260] Viral construct expression vector: As used herein, a “viral construct expression vector” is a vector which comprises one or more polynucleotide regions encoding or comprising Rep and or Cap that further comprises one or more polynucleotide regions encoding or comprising components for viral expression in a viral replication cell.

[0261] Viral genome: As used herein, a “viral genome” is a polynucleotide encoding at least one inverted terminal repeat (ITR), at least one regulatory sequence, and at least one payload. The viral genome is derived by replication of a payload construct from the payload construct expression vector. A viral genome encodes at least one copy of the payload construct. Where CRISPR regulatable elements are encoded, a viral genome encodes at least one copy of the CRISPR-AAV payload construct.

### EQUIVALENTS AND SCOPE

[0262] Those skilled in the art will recognize, or be able to ascertain using no more than routine experimentation, many equivalents to the specific embodiments in accordance with the invention described herein. The scope of the present invention is not intended to be limited to the above Description, but rather is as set forth in the appended claims.

[0263] In the claims, articles such as “a,” “an,” and “the” may mean one or more than one unless indicated to the contrary or otherwise evident from the context. Claims or descriptions that include “or” between one or more members of a group are considered satisfied if one, more than one, or all of the group members are present in, employed in, or otherwise relevant to a given product or process unless indicated to the contrary or otherwise evident from the context. The invention includes embodiments in which exactly one member of the group is present in, employed in, or otherwise relevant to a given product or process. The invention includes embodiments in which more than one, or the entire group members are present in, employed in, or otherwise relevant to a given product or process.

[0264] It is also noted that the term “comprising” is intended to be open and permits but does not require the inclusion of additional elements or steps. When the term “comprising” is used herein, the term “consisting of” is thus also encompassed and disclosed.

[0265] Where ranges are given, endpoints are included. Furthermore, it is to be understood that unless otherwise indicated or otherwise evident from the context and understanding of one of ordinary skill in the art, values that are expressed as ranges can assume any specific value or subrange within the stated ranges in different embodiments of the invention, to the tenth of the unit of the lower limit of the range, unless the context clearly dictates otherwise.

[0266] In addition, it is to be understood that any particular embodiment of the present invention that falls within the prior art may be explicitly excluded from any one or more of the claims. Since such embodiments are deemed to be known to one of ordinary skill in the art, they may be excluded even if the exclusion is not set forth explicitly herein. Any particular embodiment of the compositions of the invention (e.g., any antibiotic, therapeutic or active ingredient; any method of production; any method of use; etc.) can be excluded from any one or more claims, for any reason, whether or not related to the existence of prior art.

[0267] It is to be understood that the words which have been used are words of description rather than limitation, and that changes may be made within the purview of the appended claims without departing from the true scope and spirit of the invention in its broader aspects.

[0268] While the present invention has been described at some length and with some particularity with respect to the several described embodiments, it is not intended that it should be limited to any such particulars or embodiments or any particular embodiment, but it is to be construed with references to the appended claims so as to provide the broadest possible interpretation of such claims in view of the prior art and, therefore, to effectively encompass the intended scope of the invention.

### EXAMPLES

### Example 1. Gene Expression

[0269] The level of transgene expression by CRISPR-AAV particles produced and purified by the methods described herein is determined by real-time quantitative polymerase chain reaction (qPCR). A culture of 293 cells engineered to produce helper components required for AAV production is infected by CRISPR-AAV particles produced as described herein.

[0270] The target 293 cells are harvested at a series of time points, lysed and the mRNA is purified. The level of transgene expressed is determined by reverse transcription (qPCR) on a thermal cycler equipped with an excitation source filters, and detector for quantification of the reaction such as, but not limited to, the 7500 FAST Real-Time PCR system (Applied Biosystems, Foster City Calif.).

[0271] CRISPR-AAV particles produced and purified by the methods described herein is treated with proteinase K, serially diluted, and PCR-amplified using a fluor such as, but not limited to, SYBR green (Applied Biosystems, Foster City, Calif.) with primers specific to the transgene sequence. A reference transgene oligonucleotide is used as a copy number standard. The cycling conditions are: 95° C. for 3 min, followed by 35 cycles of 95° C. for 30 sec, 60° C. for 30 sec, and 72° C. for 30 sec.

### Example 2. Recombinant CRISPR-AAV Production in Invertebrate Cells

[0272] The AAV viral construct vector encodes the three structural cap proteins, VP1, VP2, and VP3, in a single open reading frame regulated by utilization of both alternative splice acceptor and non-canonical translational initiation codon(s). In-frame and out-of-frame ATG triplets preventing translation initiation at a position between the VP1 and VP2 start codons are eliminated. Both Rep78 and Rep52 are translated from a single transcript: Rep78 translation initiates at a non-AUG codon and Rep52 translation initiates at the first AUG in the transcript.

[0273] The nucleotides that encode the structural VP1, VP2, and VP3 capsid proteins and non-structural Rep78 and Rep52 proteins are contained on one viral expression construct under control of the baculovirus major late promoter.

[0274] The payload construct vector encodes two ITR sequences flanking a transgene polynucleotide encoding a polypeptide or modulatory nucleic acid and/or one or more CRISPR regulatable elements. The ITR sequences allow for replication of a polynucleotide encoding the transgene and ITR sequences alone that will be packaged within the capsid of the viral vector. The replicated polynucleotide encodes ITR sequences on the 5′ and 3′ ends of the molecule.

[0275] The payload construct vector and viral construct vector each comprise a Tn7 transposon element that transposes the ITR-payload sequences or the Rep and Cap sequences respectively to a bacmid that comprises the attTn7 attachment site. Competent bacterial DH10 cells are transfected with either the payload construct vector or viral construct vector. The resultant viral construct expression vector and payload construct expression vector produced in the competent cell are then purified by detergent lysis and purification on DNA columns.

[0276] Separate seed cultures of Sf9 cells in serum free suspension culture are transfected with the viral construct expression vector or payload construct expression vector. The cultures are maintained for 48 hours while baculovirus is produced and released into the medium. The baculovirus released into the media continue to infect Sf9 cells in an exponential manner until all of the Sf9 cells in the culture are infected at least once. The baculoviral infected insect cells (BIIC) and media of the seed culture is harvested and divided into aliquots before being frozen in liquid nitrogen.

[0277] A naïve population of un-transfected Sf9 cells is expanded in serum free suspension cell culture conditions. Once the culture growth has reached peak log phase in 1 L of media as measured by optical density the culture is added to a large volume 20 L bioreactor. The bioreactor culture is co-inoculated with a frozen viral construct expression vector and payload construct expression vector BIIC aliquot. The conditions of the Sf9 cell suspension culture is monitored by instruments that measure and/or control external variables that support the growth and activity of viral replication cells such as mass, temperature, CO₂, O₂, pH, and/or optical density (OD). The Sf9 culture is maintained at optimal conditions until cell population growth has reached peak log phase and before cell growth has plateaued, as measured by optical density.

[0278] In each viral replication cell that has been infected with both baculoviruses the payload flanked on one end with an ITR sequence is replicated pathway producing a CRISPR-AAV genome and packaged in a capsid assembled from the proteins VP1, VP2, and VP3.

[0279] The viral replication cells are lysed using the Microfluidizer™ (Microfluidics International Corp., Newton, Mass.), high shear force fluid processor. The resultant cell lysate is clarified by low speed centrifugation followed by tangential flow filtration. The resultant clarified lysate is filtered by a size exclusion column to remove any remaining baculoviral particles from solution. The final steps utilize ultracentrifugation and sterile filtration to produce viral particles suitable for use as described herein.

[0280] The titer of CRISPR-AAV particles produced and purified by the methods described herein is determined by real-time quantitative polymerase chain reaction (qPCR) on a thermal cycler equipped with an excitation source filters, and detector for quantification of the reaction such as, but not limited to, the 7500 FAST Real-Time PCR system (Applied Biosystems, Foster City Calif.). CRISPR-AAV particles produced and purified by the methods described herein is treated with proteinase K, serially diluted, and PCR-amplified using a fluor such as, but not limited to, SYBR green (Applied Biosystems, Foster City, Calif.) with primers specific to the AAV genome ITR sequences. Linearized AAV vector genome is used as a copy number standard. The cycling conditions are: 95° C. for 3 min, followed by 35 cycles of 95° C. for 30 sec, 60° C. for 30 sec, and 72° C. for 30 sec.

### Example 3. Incorporation of Destabilizing Sequences or Domains

[0281] To minimize long-term dsDNA cleavage, CRISPR-AAV constructs with destabilizing domains and destabilizing RNA sequences are prepared, produced and tested.

### A. Destabilizing Domains—Cas9 Fusion Protein

### Overview

[0282] While not wishing to be bound by theory, destabilizing domains are known to confer instability and decrease transgene expression. The presence of the destabilizing domain can trigger the cell's proteasomal degradation systems, which then can lead to cas9 destruction. Destabilizing domains may comprise peptide sequences which are rich in a particular subset of amino acids which are thought to signal degradation, such as, but not limited to, proline, glutamic acid, serine and threonine (known as PEST sequences).

[0283] In some embodiments, destabilizing domains, which can be used in the cas9-fusion protein encoded by the CRISPR-AAV payload construct expression vector include, but are not limited to, destabilizing domains from FK506 Binding Protein (FKBP), E. coli dihyrofolate reductase (DHFR), mouse ornithine decarboxylase (MODC), and estrogen receptors (ER). As a non-limiting example, the destabilizing domain may be from an estrogen receptor.

### AAV Construct Preparation and Analysis

[0284] In order to study methods to minimize unwanted long-term cleavage of dsDNA, a CRISPR-AAV payload construct expression vector of Example 2 with a cas9-fusion protein (e.g., a cas9 endonuclease fused to a destabilizing domain) is prepared, produced and tested by methods known in the art and described herein.

[0285] The decreased protein half-life of cas9 endonuclease with a destabilizing domain is tested by infecting HEK293 cells with the CRISPR-AAV payload construct expression vectors comprising cas9 with or without destabilizing domain. Cells are lysed over a predetermined time course (e.g., 24 hours) post infection and protein extracts prepared for ELISA and Western blot analysis. Further, in separate plates, fluorescently tagged CRISPR-AAV payload construct expression vectors are infected into the same cell system and fluorescence intensity is monitored over time. Additionally, cycloheximide blocking and pulse chase experiments are performed in the same cell system.

### B. Destabilizing RNA Sequences

[0286] To prepare a destabilized RNA sequence, the CRISPR-AAV payload construct expression vector of Example 2 includes a 3′UTR destabilizing sequence. This destabilized RNA sequence may be used to shorten the half-life of cas9.

[0287] One type of 3′UTR destabilizing sequence is AU-rich elements (AREs) and AUUUA motifs. While not wishing to be bound by theory these elements and motifs may be the primary means for mediating mRNA destabilization. Examples of this type of motif are evident in the 3′UTR of human estrogen receptor alpha (hERα) as well as in cytokines, proto-oncogenes and interferon mRNAs.

[0288] To determine the effectiveness of the destabilizing RNA sequence, a CRISPR-AAV payload construct expression vector which encodes cas9 and contains a destabilizing sequence, is produced and purified as in example 2. A CRISPR-AAV payload construct expression vector without the destabilizing sequence is used as a control and produced in parallel. The half-life of cas9 mRNA and/or the corresponding protein levels are analyzed over time a predetermined time course in HEK293 cells. Cells are lysed over a time course post infection and RNA and protein extracts are prepared. Half-life of mRNA in both samples is measured by methods known in the art and described herein such as monitoring deadenylation via transcriptional pulsing techniques.

### Example 4. Punctuated Expression of Cas9

[0289] In order to study methods to induce transient, burst expression of cas9, a CRISPR-AAV payload construct expression vector of Example 2 which encodes cas9, a DNA binding domain and a transactivating factor is prepared, produced and tested by methods known in the art and described herein. The cas9 sequence is located in the open reading frame of the vector and a DNA binding domain (DBD) and transactivating factor are located in VP2. The transactivating factor may be coupled to the DBD.

[0290] The DBD may be a pre-engineered DBD targeted specifically to the promoter used for cas9. While not wishing to be bound by theory, upon expression of VP2 in a biological system, the DBD locates and binds to the cas9 promoter. If the transactivating factor is for cas9 and the transactivating factor is coupled to the DBD, upon DBD binding to the cas9 promoter, the transactivating factor drives expression of cas9.

[0291] The nature of the interaction between the promoter and the DBD coupled to a transactivating factor generates a transient, burst expression of cas9. This punctuated expression may be beneficial as it may limit the possibility of side-effects of extended elevated expression of cas9.

[0292] To study the burst expression of cas9, a CRISPR-AAV payload construct expression vector with the DBD and the transactivating factor is purified and produced as described in Example 2. As a control, a CRISPR-AAV payload construct expression vector lacking the DBD and transactivating domain is produced in parallel.

[0293] Expression of cas9 is measured by methods described herein and known in the art, such as in HEK293 cells for the CRISPR-AAV payload construct expression vector with or without the DBD and transactivating factor. Cells are lysed at different time points and protein extracts are prepared for ELISA and Western blot analysis.

[0294] The specificity of cas9 cleavage is confirmed by deep sequencing of samples collected and the extent of dsDNA cleavage by cas9 or cas9-destabilizing domain fusion protein is measured by ligation-mediated purification or genome modification assays such as SURVEYOR. Indel percentage is calculated from the integrated intensities of the undigested PCR product and each of the cleavage products.

The application's sequence listing, which the Patent Office published only in electronic form, follows.

SEQUENCE LISTING (221 sequences)

SEQ ID NO: 1 - protein, 1388 aa, Streptococcus thermophilus
MTKPYSIGLDIGTNSVGWAVTTDNYKVPSKKMKVLGNTSKKYIKKNLLGVLLFDSGITAEGRRLKRTARRRYTRRRNRILYLQEIFSTEMATLDDAFFQRLDDSFLVPDDKRDSKYPIFGNLVEEKAYHDEFPTIYHLRKYLADSTKKADLRLVYLALAHMIKYRGHFLIEGEFNSKNNDIQKNFQDFLDTYNAIFESDLSLENSKQLEEIVKDKISKLEKKDRILKLFPGEKNSGIFSEFLKLIVGNQADFRKCFNLDEKASLHFSKESYDEDLETLLGYIGDDYSDVFLKAKKLYDAILLSGFLTVTDNETEAPLSSAMIKRYNEHKEDLALLKEYIRNISLKTYNEVFKDDTKNGYAGYIDGKTNQEDFYVYLKKLLAEFEGADYFLEKIDREDFLRKQRTFDNGSIPYQIHLQEMRAILDKQAKFYPFLAKNKERIEKILTFRIPYYVGPLARGNSDFAWSIRKRNEKITPWNFEDVIDKESSAEAFINRMTSFDLYLPEEKVLPKHSLLYETFNVYNELTKVRFIAESMRDYQFLDSKQKKDIVRLYFKDKRKVTDKDIIEYLHAIYGYDGIELKGIEKQFNSSLSTYHDLLNIINDKEFLDDSSNEAIIEEIIHTLTIFEDREMIKQRLSKFENIFDKSVLKKLSRRHYTGWGKLSAKLINGIRDEKSGNTILDYLIDDGISNRNFMQLIHDDALSFKKKIQKAQIIGDEDKGNIKEVVKSLPGSPAIKKGILQSIKIVDELVKVMGGRKPESIVVEMARENQYTNQGKSNSQQRLKRLEKSLKELGSKILKENIPAKLSKIDNNALQNDRLYLYYLQNGKDMYTGDDLDIDRLSNYDIDHIIPQAFLKDNSIDNKVLVSSASNRGKSDDVPSLEVVKKRKTFWYQLLKSKLISQRKFDNLTKAERGGLSPEDKAGFIQRQLVETRQITKHVARLLDEKFNNKKDENNRAVRTVKIITLKSTLVSQFRKDFELYKVREINDFHHAHDAYLNAVVASALLKKYPKLEPEFVYGDYPKYNSFRERKSATEKVYFYSNIMNIFKKSISLADGRVIERPLIEVNEETGESVWNKESDLATVRRVLSYPQVNVVKKVEEQNHGLDRGKPKGLFNANLSSKPKPNSNENLVGAKEYLDPKKYGGYAGISNSFTVLVKGTIEKGAKKKITNVLEFQGISILDRINYRKDKLNFLLEKGYKDIELIIELPKYSLFELSDGSRRMLASILSTNNKRGEIHKGNQIFLSQKFVKLLYHAKRISNTINENHRKYVENHKKEFEELFYYILEFNENYVGAKKNGKLLNSAFQSWQNHSIDELCSSFIGPTGSERKGLFELTSRGSAADFEFLGVKIPRYRDYTPSSLLKDATLIHQSVTGLYETRIDLAKLGEG

SEQ ID NO: 2 - protein, 1368 aa, Streptococcus pyogenes [sequence omitted]

SEQ ID NO: 3 - protein, 1409 aa, Streptococcus thermophilus
MLFNKCIIISINLDFSNKEKCMTKPYSIGLDIGTNSVGWAVITDNYKVPSKKMKVLGNTSKKYIKKNLLGVLLFDSGITAEGRRLKRTARRRYTRRRNRILYLQEIFSTEMATLDDAFFQRLDDSFLVPDDKRDSKYPIFGNLVEEKVYHDEFPTIYHLRKYLADSTKKADLRLVYLALAHMIKYRGHFLIEGEFNSKNNDIQKNFQDFLDTYNAIFESDLSLENSKQLEEIVKDKISKLEKKDRILKLFPGEKNSGIFSEFLKLIVGNQADFRKCFNLDEKASLHFSKESYDEDLETLLGYIGDDYSDVFLKAKKLYDAILLSGFLTVTDNETEAPLSSAMIKRYNEHKEDLALLKEYIRNISLKTYNEVFKDDTKNGYAGYIDGKTNQEDFYVYLKNLLAEFEGADYFLEKIDREDFLRKQRTFDNGSIPYQIHLQEMRAILDKQAKFYPFLAKNKERIEKILTFRIPYYVGPLARGNSDFAWSIRKRNEKITPWNFEDVIDKESSAEAFINRMTSFDLYLPEEKVLPKHSLLYETFNVYNELTKVRFIAESMRDYQFLDSKQKKDIVRLYFKDKRKVTDKDIIEYLHAIYGYDGIELKGIEKQFNSSLSTYHDLLNIINDKEFLDDSSNEAIIEEIIHTLTIFEDREMIKQRLSKFENIFDKSVLKKLSRRHYTGWGKLSAKLINGIRDEKSGNTILDYLIDDGISNRNFMQLIHDDALSFKKKIQKAQIIGDEDKGNIKEVVKSLPGSPAIKKGILQSIKIVDELVKVMGGRKPESIVVEMARENQYTNQGKSNSQQRLKRLEKSLKELGSKILKENIPAKLSKIDNNALQNDRLYLYYLQNGKDMYTGDDLDIDRLSNYDIDHIIPQAFLKDNSIDNKVLVSSASNRGKSDDFPSLEVVKKRKTFWYQLLKSKLISQRKFDNLTKAERGGLLPEDKAGFIQRQLVETRQITKHVARLLDEKFNNKKDENNRAVRTVKIITLKSTLVSQFRKDFELYKVREINDFHHAHDAYLNAVIASALLKKYPKLEPEFVYGDYPKYNSFRERKSATEKVYFYSNIMNIFKKSISLADGRVIERPLIEVNEETGESVWNKESDLATVRRVLSYPQVNVVKKVEEQNHGLDRGKPKGLFNANLSSKPKPNSNENLVGAKEYLDPKKYGGYAGISNSFAVLVKGTIEKGAKKKITNVLEFQGISILDRINYRKDKLNFLLEKGYKDIELIIELPKYSLFELSDGSRRMLASILSTNNKRGEIHKGNQIFLSQKFVKLLYHAKRISNTINENHRKYVENHKKEFEELFYYILEFNENYVGAKKNGKLLNSAFQSWQNHSIDELCSSFIGPTGSERKGLFELTSRGSAADFEFLGVKIPRYRDYTPSSLLKDATLIHQSVTGLYETRIDLAKLGEG

SEQ ID NO: 4 - protein, 1370 aa, Streptococcus ratti
MKKPYSIGLDIGTNSVGWAVITDDYKVPAKKMKVLGNTDKNYIKKNLLGALLFDSGNTAEDRRLKRTARRRYTRRRNRLLYLQDIFSDEMNKVDESFFHRLEDSFLVSEDKRGDHHPIFGNVVDEVKYHEQFPTIYHLRKYLADTPEKADLRLVYLALAHMIKFRGHFLIDDPKLDVKNTDSQELFSQFLTAYDVTQEDSHLADVKINISDIITEKMNKSRKVEALLFHFPSQKKNSFFGNLVSLVFGLLPNFKTNFNLAEDAKLQLSKDSYDEDLENLLGQIGDEYTDVFVAARKLYDSILLSGILTVNDLSTKAILSASMVRRYEEHNKDLAKLKAFVKANFTHDVFKEVFSDASKNGYAGYIEGKTSQEDFYKYVKNLIGKVDGSADFIEKIDREDFLRKQRTFDNGSIPHQVHLAEMKAILRRQGEYYPFLKEHAEKIQQILTFRIPYYVGPLDRHGHSDFAWASFNSEEKVTPWNFEEIIDKNKSAQAFIERMTNQDLYLPNEKVLPKHSPLYEKYTVYNELTKIKYVTETGTAKFFDANLKQEIFDGLFKKERKVTKRKLLTFLEKNFDEFRIVDIQGLDKETETFNASYGIYQDLLKIIKDKAFMDDSENADILEDIVLTLTLFEDREMIKQRLAKYADLFDKKVIDNLARRRYTGWGRLSAKLLNGIRDKRSRKTIMDYLVDDGRSNRNLMQLITDDNLTFKDEIAKAQYSDNSDDLHQVVQDLAGSPAIKKGILQSVKIVDELVKVMGYEPEQIVVEMARENQTTAKGRRNSQQRYKRLEEAIKNLDRDLNYKILKEHPTDNQALQNDRLFLYYLQNGRDMYTGESLDINRLSDYDIDHIIPQAFIKDNSIDNRVLVSSAKNRGKSDDVPSEDVVNRMRPFWNKLLNCGLISQRKYSNLTKKELTPNDKAGFIKRQLVETRQITKHVARILDEHFNKEFDEDKKRIRKVKVVTLKSNLVSNFRKEFELYKVREINDYHHAHDAYLNAVVAKALLMKYPKLEPEFVYGEYPKYNSYRERKTATQRMFFYSNIMNMFKSKVKLADERIIERPMIEVNDETGEIAWDKTKHIATVKKVLSYPQINIVKKVEEQTGGLTNETIYPRGSFDKLLNRKNTLEASKYGGFGSPTVAYCVLVVADSKNENGKVKKLKLGSELLGITILEKNDFENNSLDFLSRKGYQGVQEKKIIKLPKYSLFEFQDGSRRMLSSVMANDNKRGDLQKANEMILPAYLVKLLYHAKHINSVGEPAHKNYINEHCSEFQDLLNYIRQFADKFVDVDKNLSKIRSLSKSMAEYSVSEICSSFVNLLTLTALGAPADFKFFGTTIPRKRYGSPQSILSATLIHQSITGLYETRIDLSKLGED

SEQ ID NO: 5 - protein, 1370 aa, Streptococcus agalactiae
MNKPYSIGLDIGTNSVGWSIITDDYKVPAKKMRVLGNTDKEYIKKNLIGALLFDGGNTAADRRLKRTARRRYTRRRNRILYLQEIFAEEMSKVDDSFFHRLEDSFLVEEDKRGSKYPIFATLQEEKDYHEKFSTIYHLRKELADKKEKADLRLIYIALAHIIKFRGHFLIEDDSFDVRNTDISKQYQDFLEIFNTTFENNDLLSQNVDVEAILTDKISKSAKKDRILAQYPNQKSTGIFAEFLKLIVGNQADFKKYFNLEDKTPLQFAKDSYDEDLENLLGQIGDEFADLFSAAKKLYDSVLLSGILTVIDLSTKAPLSASMIQRYDEHREDLKQLKQFVKASLPEKYQEIFADSSKDGYAGYIEGKTNQEAFYKYLSKLLTKQEDSENFLEKIKNEDFLRKQRTFDNGSIPHQVHLTELKAIIRRQSEYYPFLKENQDRIEKILTFRIPYYIGPLAREKSDFAWMTRKTDDSIRPWNFEDLVDKEKSAEAFIHRMTNNDFYLPEEKVLPKHSLIYEKFTVYNELTKVRYKNEQGETYFFDSNIKQEIFDGVFKEHRKVSKKKLLDFLAKEYEEFRIVDVIGLDKENKAFNASLGTYHDLEKILDKDFLDNPDNESILEDIVQTLTLFEDREMIKKRLENYKDLFTESQLKKLYRRHYTGWGRLSAKLINGIRDKESQKTILDYLIDDGRSNRNFMQLINDDGLSFKSIISKAQAGSHSDNLKEVVGELAGSPAIKKGILQSLKIVDELVKVMGYEPEQIVVEMARENQTTNQGRRNSRQRYKLLDDGVKNLASDLNGNILKEYPTDNQALQNERLFLYYLQNGRDMYTGEALDIDNLSQYDIDHIIPQAFIKDDSIDNRVLVSSAKNRGKSDDVPSLEIVKDCKVFWKKLLDAKLMSQRKYDNLTKAERGGLTSDDKARFIQRQLVETRQITKHVARILDERFNNELDSKGRRIRKVKIVTLKSNLVSNFRKEFGFYKIREVNNYHHAHDAYLNAVVAKAILTKYPQLEPEFVYGDYPKYNSYKTRKSATEKLFFYSNIMNFFKTKVTLADGTVVVKDDIEVNNDTGEIVWDKKKHFATVRKVLSYPQNNIVKKTEIQTGGFSKESILAHGNSDKLIPRKTKDIYLDPKKYGGFDSPIVAYSVLVVADIKKGKAQKLKTVTELLGITIMERSRFEKNPSAFLESKGYLNIRADKLIILPKYSLFELENGRRRLLASAGELQKGNELALPTQFMKFLYLASRYNESKGKPEEIEKKQEFVNQHVSYFDDILQLINDFSKRVILADANLEKINKLYQDNKENISVDELANNIINLFTFTSLGAPAAFKFFDKIVDRKRYTSTKEVLNSTLIHQSITGLYETRIDLGKLGED

SEQ ID NO: 6 - protein, 1371 aa, Streptococcus dysgalactiae
MDKKYSIGLDIGTNSVGWAVITDDYKVPSKKFKVLGNTDRHSIKKNLIGALLFDSGETAEATRLKRTARRRYTRRKNRIRYLQEIFSSEMSKVDDSFFHRLEESFLVEEDKKHERHPIFGNIVDEVAYHEKYPTIYHLRKKLADSTDKADLRLIYLALAHMIKFRGHFLIEGDLNPDNSDMDKLFIQLVQTYNQLFEENPINASRVDAKAILSARLSKSRRLENLIAQLPGEKRNGLFGNLIALSLGLTPNFKSNFDLAEDAKLQLSKDTYDDDLDNLLAQIGDQYADLFLAAKNLSDAILLSDILRVNSEITKAPLSASMIKRYDEHHQDLTLLKALVRQQLPEKYKEIFFDQSKNGYAGYIDGGASQEEFYKFIKPILEKMDGTEELLAKLNREDLLRKQRTFDNGSIPHQIHLGELHAILRRQEDFYPFLKDNREKIEKILTFRIPYYVGPLARGNSRFAWMTRKSEETITPWNFEEVVDKGASAQSFIERMTNFDKNLPNEKVLPKHSLLYEYFTVYNELTKVKYVTEGMRKPEFLSGKQKEAIVDLLFKTNRKVTVKQLKEDYFKKIECFDSVEISGVEDRFNASLGTYHDLLKIIKDKDFLDNEENEDILEDIVLTLTLFEDKEMIEERLKKYANLFDDKVMKQLKRRHYTGWGRLSRKLINGIRDKQSGKTILDFLKSDGFANRNFMQLINDDSLTFKEAIQKAQVSGQGHSLHEQIANLAGSPAIKKGILQSVKVVDELVKVMGHKPENIVIEMARENQTTQKGQKNSRERMKRIEEGIKELGSQILKEHPVENTQLQNEKLYLYYLQNGRDMYVDQELDINRLSDYDVDHIVPQSFIKDDSIDNKVLTRSDKNRGKSDNVPSEEVVKKMKNYWRQLLNAKLITQRKFDNLTKAERGGLSELDKAGFIKRQLVETRQITKHVAQILDSRMNTKYDENDKLIREVKVITLKSKLVSDFRKDFQFYKVREINNYHHAHDAYLNAVVGTALIKKYPKLESEFVYGDYKVYDVRKMIAKSEQEIGKATAKRFFYSNIMNFFKTEITLANGEIRKRPLIETNEETGEIVWDKGRDFATVRKVLSMPQVNIVKKTEVQTGALTNESIYARGSFDKLISRKHRFESSKYGGFGSPTVTYSVLVVAKSKVQDGKVKKIKTGKELIGITLLDKLVFEKNPLKFIEDKGYGNVQIDKCIKLPKYSLFEFENGTRRMLASVMANNNSRGDLQKANEMFLPAKLVTLLYHAHKIESSKELEHEAYILDHYNDLYQLLSYIERFASLYVDVEKNISKVKELFSNIESYSISEICSSVINLLTLTASGAPADFKFLGTTIPRKRYGSPQSILSSTLIHQSITGLYETRIDLSQLGGD

SEQ ID NO: 7 - protein, 1370 aa, Streptococcus agalactiae
  MOD_RES (9)..(9): Any amino acid
MNKPYSIGXDIGTNSVGWSIITDDYKVPAKKMRVLGNTDKEYIKKNLIGALLFDGGNTAADRRLKRTARRRYTRRRNRILYLQEIFAEEMSKVDDSFFHRLEDSFLVEEDKRGSKYPIFATLQEEKDYHEKFSTIYHLRKELADKKEKADLRLIYIALAHIIKFRGHFLIEDDSFDVRNTDISKQYQDFLEIFNTTFENNDLLSQNVDVEAILTDKISKSAKKDRILAQYPNQKSTGIFAEFLKLIVGNQADFKKYFNLEDKTPLQFAKDSYDEDLENLLGQIGDEFADLFSAAKKLYDSVLLSGILTVIDLSTKAPLSASMIQRYDEHREDLKQLKQFVKASLPEKYQEIFADSSKDGYAGYIEGKTNQEAFYKYLSKLLTKQEDSENFLEKIKNEDFLRKQRTFDNGSIPHQVHLTELKAIIRRQSEYYPFLKENQDRIEKILTFRIPYYIGPLAREKSDFAWMTRKTDDSIRPWNFEDLVDKEKSAEAFIHRMTNNDFYLPEEKVLPKHSLIYEKFTVYNELTKVRYKNEQGETYFFDSNIKQEIFDGVFKEHRKVSKKKLLDFLAKEYEEFRIVDVIGLDKENKAFNASLGTYHDLEKILDKDFLDNPDNESILEDIVQTLTLFEDREMIKKRLENYKDLFTESQLKKLYRRHYTGWGRLSAKLINGIRDKESQKTILDYLIDDGRSNRNFMQLINDDGLSFKSIISKAQAGSHSDNLKEVVGELAGSPAIKKGILQSLKIVDELVKVMGYEPEQIVVEMARENQTTNQGRRNSRQRYKLLDDGVKNLASDLNGNILKEYPTDNQALQNERLFLYYLQNGRDMYTGEALDIDNLSQYDIDHIIPQAFIKDDSIDNRVLVSSAKNRGKSDDVPSLEIVKDCKVFWKKLLDAKLMSQRKYDNLTKAERGGLTSDDKARFIQRQLVETRQITKHVARILDERFNNELDSKGRRIRKVKIVTLKSNLVSNFRKEFGFYKIREVNNYHHAHDAYLNAVVAKAILTKYPQLEPEFVYGDYPKYNSYKTRKSATEKLFFYSNIMNFFKTKVTLADGTVVVKDDIEVNNDTGEIVWDKKKHFATVRKVLSYPQNNIVKKTEIQTGGFSKESILAHGNSDKLIPRKTKDIYLDPKKYGGFDSPIVAYSVLVVADIKKGKAQKLKTVTELLGITIMERSRFEKNPSAFLESKGYLNIRADKLIILPKYSLFELENGRRRLLASAGELQKGNELALPTQFMKFLYLASRYNESKGKPEEIEKKQEFVNQHVSYFDDILQLINDFSKRVILADANLEKINKLYQDNKENISVDELANNIINLFTFTSLGAPAAFKFFDKIVDRKRYTSTKEVLNSTLIHQSITGLYETRIDLGKLGED

SEQ ID NO: 8 - protein, 1345 aa, Streptococcus mutans
MKKPYSIGLDIGTNSVGWSVVTDDYKVPAKKMKVLGNTDKSHIEKNLLGALLFDSGNTAEDRRLKRTARRRYTRRRNRILYLQEIFSEEMGKVDDSFFHRLEDSFLVTEDKRGERHPIFGNLEEEVKYHENFPTIYHLRQYLADNPEKVDLRLVYLALAHIIKFRGHFLIEGKFDTRNNDVQRLFQEFLAVYDNTFENSSLQEQNVQVEEILTDKISKSAKKDRVLKLFPNEKSNGRFAEFLKLIVGNQADFKKHFELEEKAPLQFSKDTYEEELEVLLAQIGDNYAELFLSAKKLYDSILLSGILTVTDVGTKAPLSASMIQRYNEHQMDLAQLKQFIRQKLSDKYNEVFSDVSKDGYAGYIDGKTNQEAFYKYLKGLLNKIEGSGYFLDKIEREDFLRKQRTFDNGSIPHQIHLQEMRAIIRRQAEFYPFLADNQDRIEKLLTFRIPYYVGPLARGKSDFAWLSRKSADKITPWNFDEIVDKESSAEAFINRMTNYDLYLPNQKVLPKHSLLYEKFTVYNELTKVKYKTEQGKTAFFDANMKQEIFDGVFKVYRKVTKDKLMDFLEKEFDEFRIVDLTGLDKENKVFNASYGTYHDLCKILDKDFLDNSKNEKILEDIVLTLTLFEDREMIRKRLENYSDLLTKEQVKKLERRHYTGWGRLSAELIHGIRNKESRKTILDYLIDDGNSNRNFMQLINDDALSFKEEIAKAQVIGETDNLNQVVSDIAGSPAIKKGILQSLKIVDELVKIMGHQPENIVVEMARENQFTNQGRRNSQQRLKGLTDSIKEFGSQILKEHPVENSQLQNDRLFLYYLQNGRDMYTGEELDIDYLSQYDIDHIIPQAFIKDNSIDNRVLTSSKENRGKSDDVPSKDVVRKMKSYWSKLLSAKLITQRKFDNLTKAERGGLTDDDKAGFIKRQLVETRQITKHVARILDERFNTETDENNKKIRQVKIVTLKSNLVSNFRKEFELYKVREINDYHHAHDAYLNAVIGKALLGVYPQLEPEFVYGDYPHFHGHKENKATAKKFFYSNIMNFFKKDDVRIDKNGEIIWKKDEHISNIKKVLSYPQVNIVKKVEEQTGGFSKESILPKGNSDKLIPRKTKKFYWDTKKYGGFDSPIVAYSILVIADIEKGKSKKLKTVKALVGVTIMEKMTFERDPVAFLERKGYRNVQEENIIKLPKYSLFKLENGRKRLLASARELQKGNEIVLPNHLGTLLYHAKNIHKVDEPKHLDYVDKHKDEFKELLDVVSNFSKKYTLAEGNLEKIKELYAQNNGEDLKELASSFINLLTFTAIGAPATFKFFDKNIDRKRYTSTTEILNATLIHQSITGLYETRIDLSKLGGD

SEQ ID NO: 9 - protein, 1370 aa, Streptococcus agalactiae
  MOD_RES (117)..(117): Any amino acid
MNKPYSIGLDIGTNSVGWSIITDDYKVPAKKMRVLGNTDKEYIKKNLIGALLFDGGNTAADRRLKRTARRRYTRRRNRILYLQEIFAEEMSKVDDSFFHRLEDSFLVEEDKRGSKYXIFATLQEEKDYHEKFSTIYHLRKELADKKEKADLRLIYIALAHIIKFRGHFLIEDDSFDVRNTDISKQYQDFLEIFNTTFENNDLLSQNVDVEAILTDKISKSAKKDRILAQYPNQKSTGIFAEFLKLIVGNQADFKKYFNLEDKTPLQFAKDSYDEDLENLLGQIGDEFADLFSAAKKLYDSVLLSGILTVIDLSTKAPLSASMIQRYDEHREDLKQLKQFVKASLPEKYQEIFADSSKDGYAGYIEGKTNQEAFYKYLSKLLTKQEDSENFLEKIKNEDFLRKQRTFDNGSIPHQVHLTELKAIIRRQSEYYPFLKENQDRIEKILTFRIPYYIGPLAREKSDFAWMTRKTDDSIRPWNFEDLVDKEKSAEAFIHRMTNNDFYLPEEKVLPKHSLIYEKFTVYNELTKVRYKNEQGETYFFDSNIKQEIFDGVFKEHRKVSKKKLLDFLAKEYEEFRIVDVIGLDKENKAFNASLGTYHDLEKILDKDFLDNPDNESILEDIVQTLTLFEDREMIKKRLENYKDLFTESQLKKLYRRHYTGWGRLSAKLINGIRDKESQKTILDYLIDDGRSNRNFMQLINDDGLSFKSIISKAQAGSHSDNLKEVVGELAGSPAIKKGILQSLKIVDELVKVMGYEPEQIVVEMARENQTTNQGRRNSRQRYKLLDDGVKNLASDLNGNILKEYPTDNQALQNERLFLYYLQNGRDMYTGEALDIDNLSQYDIDHIIPQAFIKDDSIDNRVLVSSAKNRGKSDDVPSLEIVKDCKVFWKKLLDAKLMSQRKYDNLTKAERGGLTSDDKARFIQRQLVETRQITKHVARILDERFNNELDSKGRRIRKVKIVTLKSNLVSNFRKEFGFYKIREVNNYHHAHDAYLNAVVAKAILTKYPQLEPEFVYGDYPKYNSYKTRKSATEKLFFYSNIMNFFKTKVTLADGTVVVKDDIEVNNDTGEIVWDKKKHFATVRKVLSYPQNNIVKKTEIQTGGFSKESILAHGNSDKLIPRKTKDIYLDPKKYGGFDSPIVAYSVLVVADIKKGKAQKLKTVTELLGITIMERSRFEKNPSAFLESKGYLNIRADKLIILPKYSLFELENGRRRLLASAGELQKGNELALPTQFMKFLYLASRYNESKGKPEEIEKKQEFVNQHVSYFDDILQLINDFSKRVILADANLEKINKLYQDNKENISVDELANNIINLFTFTSLGAPAAFKFFDKIVDRKRYTSTKEVLNSTLIHQSITGLYETRIDLGKLGED

SEQ ID NO: 10 - protein, 1370 aa, Streptococcus agalactiae
MNKPYSIGLDIGTNSVGWSIITDDYKVPAKKMRVLGNTDKEYIKKNLIGALLFDGGNTAADRRLKRTARRRYTRRRNRILYLQEIFAEEMSKVDDSFFHRLEDSFLVEEDKRGSKYPIFATMQEEKDYHEKFPTIYHLRKELADKKEKADLRLVYLALAHIIKFRGHFLIEDDRFDVRNTDIQKQYQAFLEIFDTSFENNHLLSQNVDVEAILTDKISKSAKKDRILAQYPNQKSTGIFAEFLKLIVGNQADFKKHFNLEDKTPLQFAKDSYDEDLENLLGQIGDEFADLFSAAKKLYDSVLLSGILTVTDLSTKAPLSAYMIQRYDEHREDLKQLKQFVKASLPEKYQEIFADSSKDGYAGYIEGKTNQEAFYKYLSKLLTKQEDSEYFLEKIKNEDFLRKQRTFDNGSIPHQVHLTELKAIIRRQSEYYPFLKENQDKIEKILTFRIPYYVGPLARGNSDFAWMTRKTDDSIRPWNFEDLVDKEKSAEAFIHRMTNNDLYLPEEKVLPKHSLIYEKFTVYNELTKVRYKNEQGETYFFDSNVKQEIFDGVFKEHRKVSKKQLLDFLAKEFEEFRIVDVTGLDKENKAFNASLGTYHDLKKILDKDFLDNPDNESILEDIVQTITLFEDREMIKKRLENYKDLFTESQLKKLYRRHYTGWGRLSAKLINGIRDRESQKTILDYLISDGRANRNFMQLINDDGLSFKSIISKAQSGSHSDNLKEVVGELAGSPAIKKGILQSLKIVDELVKVMGYEPEQIVVEMARENQTTNQGRRNSRQRYKLLEDGVKNLASDLNGDILKEYPTDNQALQNERLFLYYLQNGRDMYTGEALDIDNLSQYDIDHIVPQAFIKDDSIDNRVLVSSAKNRGKSDDVPSIDIVKARKAFWKKLLDAKLISQRKYDNLTKAERGGLTPDDKAGFIQRQLVETRQITKHVARILDERFNNKVDDNNKPIRKVKIVTLKSNLVSNFRKEFGFYKIREVNNYHHAHDAYLNAVVAKAILTKYPQLEPEFVYGDYPKYNSYKTRKSATEKLFFYSNIMNFFKTKVTLADETVVVKDDIEVNNETGEIAWDKKKHFATVRKVLSYPQVNIVKKTEVQTGGFSKESILAHSNSDKLIPRKTKDIYLDPKKYGGFDSPIVAYSVLVLADIKKGKAQKLKTVKELIGITIMERERFEKNPSAFLESKGYLNIRTDKLIILPKYSLFELENGRRRLLASAGELQKGNELALPTQYMKFLYLASRYNESKGKPEEIEKKQEFVNQHISYFDDILQLINDFSKRVILADANLEKINKLYSDNKDNTPVDELAKNIINLFTFTSLGAPAAFKFFDKSVDRKRYTSTKEVLDSTLIHQSITGLYETRIDLGKLGED

SEQ ID NO: 11 - protein, 1345 aa, Streptococcus mutans
MKKPYSIGLDIGTNSVGWAVVTDDYKVPAKKMKVLGNTDKSHIKKNLLGALLFDSGNTAADRRLKRTARRRYTRRRNRILYLQEIFAEEMSKVDDSFFHRLEDSFLVTEDKRGERHPIFGNLEEEVKYHENFPTIYHLRQYLADNPEKVDLRLVYLALAHIIKFRGHFLIEGKFDTRNNDVQRLFQEFLAVYDNTFENSSLQEQNVQVEEILTDKISKSAKKDRVLKLFPNEKSNGRFAEFLKLIVGNQADFKKHFELEEKAPLQFSKDTYEEELEVLLAQIGDNYAELFLSAKKLYDSILLSGILTVTDVSTKAPLSASMIQRYNEHQMDLAQLKQFIRQKLSDKYNEVFSDVSKDGYAGYIDGKTNQEAFYKYLKGLLNKIEGSGYFLDKIEREDFLRKQRTFDNGSIPHQIHLQEMRAIIRRQAEFYPFLADNQDRIEKILTFRIPYYVGPLARGKSDFAWLSRKSADKITPWNFDEIVDKESSAEAFINRMTNYDLYLPNQKVLPKHSLLYEKFTVYNELTKVKYKTEQGKTAFFDANMKQEIFDGVFKVYRKVTKDKLMDFLEKEFDEFRIVDLTGLDKENKVFNASYGTYHDLCKILDKDFLDNSKNEKILEDIVLTLTLFEDREMIRKRLENYSDLLTKEQVKKLERRHYTGWGRLSAELIHGIRNKESRKTILDYLIDDGNSNRNFMQLINDDALSFKEEIAKAQVIGETDNLNQVVSDIAGSPAIKKGILQSLKIVDELVKIMGHQPENIVVEMARENQFTKQGRRNSQQRLKGLTDSIKEFGSQILKEHPVENSQLQNDRLFLYYLQNGRDMYTGEELDIDYLSQYDIDHIIPQAFIKDNSIDNRVLTSSKENRGKSDDVPSKDVVRKMKSYWSKLLSAKLITQRKFDNLTKAERGGLTDDDKAGFIKRQLVETRQITKHVARILDERFYTETDENNKKIRQVKIVTLKSNLVSNFRKEFELYKVREINDYHHAHDAYLNAVIGKALLGVYPQLEPEFVYGDYPHFHGHKENKATAKKFFYSNIMNFFKKDDVRTDKNGEIIWKKDEHISNIKKVLSYPQVNIVKKVEEQTGGFSKESILPKGNSDKLIPRKTKKFYWDTKKYGGFDSPIVAYSILVIADIEKGKSKKLKTVKALVGVTIMEKMTFERDPVAFLERKGYRNVQEENIIKLPKYSLFKLENGRKRLLASARELQKGNEIVLPNHLGTLLYHAKNIHKVDEPKHLDYVDKHKDEFKELLDVVSNFSKKYTLAEGNLEKIKELYAQNNGEDLKELASSFINLLTFTAIGAPATFKFFDKNIDRKRYTSTTEILNATLIHQSITGLYETRIDLSKLGGD

SEQ ID NO: 12 - protein, 1350 aa, Streptococcus mutans
MKKPYSIGLDIGTNSVGWAVVTDDYKVPAKKMKVLGNTDKSHIEKNLLGALLFDSGNTAEDRRLKRTARRRYTRRRNRILYLQEIFSEEMGKVDDSFFHRLEDSFLVTEDKRGERHPIFGNLEEEVKYHENFPTIYHLRQYLADNPEKVDLRLVYLALAHIIKFRGHFLIEGKFDTRNNDVQRLFQEFLAVYDNTFENSSLQEQNVQVEEILTDKISKSAKKDRVLKLFPNEKSNGRFAEFLKLIVGNQADFKKHFELEEKAPLQFSKDTYEEELEVLLAQIGDNYAELFLSAKKLYDSILLSGILTVTDVSTKAPLSASMIQRYNEHQMDLTQLKQFIRQKLSDKYNEVFSDVSKDGYAGYIDGKTNQEAFYKYLKGLLNKIEGSGYFLDKIEREDFLRKQRTFDNGSIPHQIHLQEMRAIIRRQAEFYPFLADNQDRIEKILTFRIPYYVGPLARGKSDFAWLSRKSADKITPWNFDEIVDKESSAEAFINRMTNYDLYLPNQKVLPKHSLLYEKFTVYNELTKVKYKTEQGKTAFFDANMKQEIFDGVFKVYRKVTKDKLMDFLEKEFDEFRIVDLTGLDKENKAFNASYGTYHDLRKILDKDFLDNSKNEKILEDIVLTLTLFEDREMIRKRLKNYSDLLTKEQLKKLERRHYTGWGRLSAELIHGIRNKESRKTILDYLIDDGNSNRNFMQLINDDALSFKEEIAKAQVIGETDNLNQVVSDIAGSPAIKKGILQSLKIVDELVKIMGHQPENIVVEMARENQFTNQGRQNSQQRLKGLTDSIKEFGSQILKEHPVENSQLQNDRLFLYYLQNGRDMYTGEELDIDYLSQYDIDHIIPQAFIKDNSIDNRVLTSSKENRGKSDDVPSEDVVNRMRPFWNKLLSSGLISQRKYNNLTKKELTLDDKAGFIKRQLVETRQITKHVARMLDERFNKEFDDNNKRICKVKIVTLKSNLVSSFRKEFELYKVREINDYHHAHDAYLNAVVVKALLVKYSKLEPEFVYGEYPKYNSYRERKTATQKMFFYSNIMNMFKSKVKLADDQIVERPMIEVNDETGEIAWDKTKHITTVKKVLSYPQVNIVKKVEEQTIGQNGGLFDDNPKSPLEVIPSKLVPLKKALNPEKYGGYQKPTTAYPILLIVDTKQLIPISVMDKKRFEQNPVKFLKDKGYQQIEKNNFVKLPKYTLVDIGNGIKRLWASSKEVHKGNQLVVSKKSQDLLYHAHHLDNDYSNEYVKNHYQQFDILFNEITSFSKKCKLGKEHIQKIEEAYSKERDSASIEELADGFIKLLGFTQLGATSPFSFLGIKLNQKQYTGKKDYLLPCMEATLIHQSITGLYETRIDLSKLGGD

SEQ ID NO: 13 - protein, 1345 aa, Streptococcus mutans
MKKPYSIGLDIGTNSVGWAVVTDDYKVPAKKMKVLGNTDKSHIKKNLLGALLFDSGNTAEDRRLKRTARRRYTRRRNRILYLQEIFSEEMGKVDDSFFHRLDESFLTDDDKNFDSYPIFGNKAEEDAYHQKFPTIYHLRKHLADSTEKADLRLVYLALAHMIKFRGHFLIEGELNAENTDVQKLFADFVGVYDRTFDDSHLSEITVDASSILTEKISKSRRLEKLINNYPKEKKNTLFRNLVALSLGLQPNFKTNFKLSEDAKLQFSKDTYEEDLEELLGKIGDDYADLFTLAKNLYDAILLSGILTADDSSTKAPLSASMIKRYAEHHEDLEKLKEFIKANKPELYHDIFKDETKNGYAGYIENGVKQDEFYKYLKNTLSKIAGSDYFLDKIEREDFLRKQRTFDNGSIPHQIHLQEMHAILRRQGDYYPFLKENQDRIEKILTFRIPYYVGPLARGKSDFAWLSRKSADKITPWNFDEIVDKESSVEAFINRMTNYDLYLPNQKVLPKHSLLYEKFTVYNELTKVKYKTEQGKTAFFDANMKQEIFDGVFKVYRKVTKDKLMDFLEKEFDEFRIVDLTGLDKENKAFNASYGTYHDLRKILDKDFLDNSKNEKILEDIVLTLTLFEDREMIRKRLKNYSDLLTKEQLKKLERRHYTGWGRLSAELIHGIRNKESRKTILDYLIDDGNSNRNFMQLINDDALSFKEEIAKAQVIGETDNLNQVVSDIAGSPAIKKGILQSLKIVDELVKIMGHQPENIVVEMARENQFTNQGRRNSQQRLKGLTDSIKEFGSQILKEHPVENSQLQNDRLFLYYLQNGRDMYTGEELDIDYLSQYDIDHIIPQAFIKDNSIDNRVLTSSKENRGKSDDVPSKDVVRKMKSYWSKLLSAKLITQRKFDNLTKGERGGLTDDDKAGFIKRQLVETRQITKHVARILDERFNTETDENNKKIRQVKIVTLKSNLVSNFRKEFELYKVREINDYHHAHDAYLNAVIGKALLGVYPQLEPEFVYGDYPHFHGHKENKATAKKFFYSNIMNFFKKDDVRTDKNGEIIWKKDEYISNIKKVLSYPQVNIVKKVEEQTGGFSKESILPKGDSDKLIPRKTKKFYWDTKKYGGFDSPIVAYSILVIADIEKGKSKKLKTVKALVGVTIMEKMTFERDPVAFLERKGYRNVQEENIIKLPKYSLFKLENGRKRLLASARELQKGNEIVLPNHLGTLLYHAKNIHKVDEPKHLDYVDKHKDEFKELLDVVSNFSKKYTLAEGNLEKIKELYAQNNGEDLKELASSFINLLTFTAIGAPATFKFFDKNIDRKRYTSTTEILNATLIHQSITGLYETRIDLSKLGGD

SEQ ID NO: 14 - protein, 1371 aa, Streptococcus oralis
MENKNYSIGLDIGTNSVGWSVITDDYKVPSKKMKVLGNTDKRFIKKNLIGALLFDEGTTAEARRLKRTARRRYTRRKNRLRYLQEIFAEEMSKVDSSFFHRLDDSFLIPEDKRGSKYPIFATLAEEKEYHKQFPTIYHLRKQLADSKEKTDLRLIYLALAHMIKYRGHFLYEDTFDIKNNDIQKIFSEFISIYDNTFEGSSLSGQNAQVEAIFTDKISKSAKRERVLKLFPDEKSTGLFSEFLKLIVGNQADFKKHFDLGEKAPLQFSKDTYDEDLENLLGQIGDDFADLFLVAKKLYDAILLSGILTVTDPSTKAPLSASMIERYENHQKDLAVLKQFIKNNLPEKYDEVFSDQSKDGYAGYIDGKTTQEAFYKYIKNLLSKFEGTDYFLEKIEREDFLRKQRTFDNGSIPHQIHLQEMNAILRRQGEHYPFLKDNKEKIEKILTFRIPYYVGPLARGNRDFAWLTRNSDEAIRPWNFEEIVDKASSAEDFINKMTNYDLYLPEEKVLPKHSLLYETFAVYNELTKVKFIAEGLRDYQFLDSGQKKQIVTQLFKEKRKVTEKDIIQFLHNVDGYDGIELKGIEKQFNASLSTYHDLLKIIKDKEFMDDSKNEEILENIVHTLTIFEDREMIKQRLAQYDSLFDEKVIKALIRRHYTGWGKLSAKLIDGICDKQTGNTILDYLIDDGKNNRNFMQLINDDGLSFKEITQKAQVVGKTDDVKQVVQELPGSPAIKKGILQSIKIVDELVKVMGHTPESIVIEMARENQTTARGKKNSQQRYKRIEDALKNLASGLDSNILKEHPTNNIQLQNDRLFLYYLQNGRDMYTGKPLDINQLSSYDIDHIVPQAFIKDDSLDNRVLTSLKDNRGKSDNVPSIEVVQKRKAFWQQLLDSKLISERKFNNLTKAERGGLDERDKVGFIKRQLVETRQITKHVAQILDARFNKEVNEKDKKNRTVKIITLKSNLVSNFRKEFRLYKVREINDYHHAHDAYLNAVVAKAILKKYPKLEPEFVYGDYQKYDLKRYISRSRNPKEVEKATEKYFFYSNLLNFFKEEVHYADGTIVKRENIEYSKDTGEIAWNKEKDFATIKKVLSYPQVNIVKKREVQTGGFSKESILPKGNSDKLIPRKTKDILWETTKYGGFDSPVIAYSILLIADIEKGKAKKLKTVKTLVGITIMEKAAFEENPITFLENKGYHNVRKENILCLPKYSLFELENGRRRLLASAKELQKGNEIVLPVYLTTLLYHSKNVHKLDEPEHLEYIQKHRNEFKDLLNLVSEFSQKYVLADANLEKIQNLYADNEQADIEILANSFINLLTFTALGAPAAFKFFGKDIDRKRYTTVSEILNATLIHQSITGLYETRIDLSKLGED

SEQ ID NO: 15 - protein, 1377 aa, Streptococcus agalactiae
MNKPYSIGLDIGTNSVGWSIITDDYKVPAKKMRVLGNTDKEYIKKNLIGALLFDGGNTAADRRLKRTARRRYTRRRNRILYLQEIFAEEMSKVDDSFFHRLEDSFLVEEDKRGSKYPIFATMQEEKYYHEKFPTIYHLRKELADKKEKADLRLVYLALAHIIKFRGHFLIEDDRFDVRNTDIQKQYQAFLEIFDTTFENNHLLSQNVDVEAILTDKISKSAKKDRILAQYPNQKSTGIFAEFLKLIVGNQADFKKHFNLEDKTPLQFAKDSYDEDLENLLGQIGDEFADLFSVAKKLYDSVLLSGILTVTDLSTKAPLSASMIQRYDEHHEDLKHLKQFVKASLPENYREVFADSSKDGYAGYIEGKTNQEAFYKYLLKLLTKQEGSEYFLEKIKNEDFLRKQRTFDNGSIPHQVHLTELRAIIRRQSEYYPFLKENQDRIEKILTFRIPYYVGPLAREKSDFAWMTRKTDDSIRPWNFEDLVDKEKSAEAFIHRMTNNDLYLPEEKVLPKHSLIYEKFTVYNELTKVRFLAEGFKDFQFLNRKQKETIFNSLFKEKRKVTEKDIISFLNKVDGYEGIAIKGIEKQFNASLSTYHDLKKILGKDFLDNTDNELILEDIVQTLTLFEDREMIKKCLDIYKDFFTESQLKKLYRRHYTGWGRLSAKLINGIRNKENQKTILDYLIDDGSANRNFMQLINDDDLSFKPIIDKARTGSHSDNLKEVVGELAGSPAIKKGILQSLKIVDELVKVMGYEPEQIVVEMARENQTTAKGLSRSRQRLTTLRESLANLKSNILEEKKPKYVKDQVENHHLSDDRLFLYYLQNGRDMYTKKALDIDNLSQYDIDHIIPQAFIKDDSIDNRVLVSSAKNRGKSDDVPSIEIVKARKMFWKNLLDAKLMSQRKYDNLTKAERGGLTSDDKARFIQRQLVETRQITKHVARILDERFNNEVDNGKKICKVKIVTLKSNLVSNFRKEFGFYKIREVNDYHHAHDAYLNAVVAKAILTKYPQLEPEFVYGMYRQKKLSKIVHEDKEEKYSEATRKMFFYSNLMNMFKRVVRLADGSIVVRPVIETGRYMGKTAWDKKKHFATVRKVLSYPQNNIVKKTEIQTGGFSKESILAHGNSDKLIPRKTKDIYLDPKKYGGFDSPIVAYSVLVVADIKKGKAQKLKTVTELLGITIMERSRFEKNPSAFLESKGYLNIRDDKLMILPKYSLFELENGRRRLLASAGELQKGNELALPTQFMKFLYLASRYNESKGKPEEIEKKQEFVNQHVSYFDDILQLINDFSKRVILADANLEKINKLYQDNKENIPVDELANNIINLFTFTSLGAPAAFKFFDKIVDRKRYTSTKEVLNSTLIHQSITGLYETRIDLGKLGED

SEQ ID NO: 16 - protein, 1375 aa, Streptococcus sp.
MSNKSYSIGLDIGTNSVGWAVITDDYKVPSKKMKVLGNTDKHFIKKNLIGALLFDEGTTAEDRRLKRTARRRYTRRKNRLRYLQEIFSQEISKVDSSFFHRLDDFFLVPEDKRGSKYPIFATLVEEKEYHKKFPTIYHLRKHLADSKEKTDLRLIYLALAHMIKYRGHFLYEESFDIKNNDIQKIFSEFISIYDNTFEGKSLSGQNAQVEAIFTDKISKSTKRERVLKLFPDEKSTGLFSEFLKLIVGNQADFKKHFDLEEKAPLQFSKDTYDEDLENLLGQIGDDFADLFLVAKKLYDAILLSGILTVKDLSTKAPLSASMIERYENHQKDLAALKQFIQNNLQEKYDEVFSDQSKDGYAGYIDGKTTQEAFYKYIKNLLSKFEGADYFLDKIEREDFLKKQRTFDNGSIPHQIHLQEMNAIIRRQGEHYPFLQENKEKIEKILTFRIPYYVGPLARGNGDFAWLTRNSDQAIRPWNFEEIVDQASSAEDFINKMTNYDLYLPEEKVLPKHSLLYETFAVYNELTKVKFIAEGLTRYQFLDKKQKKDIFDTFFKAENKRKVTEKDIIHYLHNVDGYDGIELKGIEKQFNASLSTYHDLLKIIKDKAFMDDSKNEEILENIIHTLTIFEDREMIKQRLAQYDSLFDEKVIKALTRRHYTGWGKLSAKLINGIRDKKSGKTILDYLIDDGEINRNFMQLIHDDGLSFKEIIQKAQVFGKTNDVKQVVQELPGSPAIKKGILQSIKIVDELVKVMGHAPESIVIEMARENQTTARGKKNSQQRYKRIEDSLKNLASGLDSNILKENPTDNIQLQNDRLFLYYLQNGRDMYTGKPLEINQLSNYDIDHIIPQAFIKDDSLDNRVLTSSKDNRGKSDNVPSLEVVEKMKAFWQQLLDSKLISERKFNNLTKAERERGGLNELDKVGFIKRQLVETRQITKHVAQFLDARFNKEVTEKDKKNRNVKIITLKSNLVSNFRKEFGLYKVREINDYHHAHDAYLNAVLAKAILKKYPKLEPEFVYGDYQKYDLQRYISKSREPKEVEKATQKYFFYSNLLNFFKEEVHYADGTIVKRENIEYSKDTGEIAWNKEKDFATVKKVLSLPQVNIVKKTEVQTGGFSKESILPKGNSDKLIPRKTKEILWDTTKYGGFDSPVIAYSILLIADIEKGKAKKLKTVKTLVGITIMEKATFEKNPITFLENKGYHNVRKENILCLPKYSLFELESGRRRMLASAKELQKGNEIVLPVYLTTLLYHSKNVHKLDEPEHLEYIQKHRYEFKDLLNLVSEFSQKYVLADANLEKIKNLYADNEQADIEILANSFINLLTFTALGAPAAFKFLGKDVDRKRYTTVSEILNATLIHQSITGLYETRIDLSKLGED

SEQ ID NO: 17 - protein, 1396 aa, Streptococcus anginosus
MTKPYSIGLDIGTNSVGWAVITDDYKVPAKKMKVLGNTNRDYIKKNLLGALLFDGGETAEGRRLKRTARRRYTRRKNRLRYLQEIFAEEMMQVDESFFQRLDDSFLVEEDKQGSKYPIFGTLKEEKEYHKKFKTIYHLREELANSKEKADLRLVYLALAHMIKFRGHFLYEGDLKAENTDVQALFKDFVEEYDKTIEESHLSEITVDALSILTEKVSKSSRLENLIAHYPTEKKNTLFGNLIALSLGLQANFKTNFQLSEDAKLQFSKDTYEEDLEGLLGEVGDEYADLFVSAKNLYDAILLSGILTVDDNSTKAPLSASMVKRYKEHKEELAAFKRFIKEKLPKKYEEIFKDDTKNGYAGYVGADKKLRKRSGKLATEEEFYKYVKGILNKVEGADYFLDKIDREDFLRKQRTFDNGSIPHQIHLQEMHAILRRQGEHYPFLKENQDKIEKILTFRIPYYVGPLARKGSRFAWAEYKADEKITPWNFDDILDKEKSAEKFITRMTLNDLYLPEEKVLPKHSPLYETFTVYNELTKVKYVNEQGEAKFFDTNMKQEIFDHVFKENRKVTKDKLLNYLNKEFEEFRIVNLTGLDKENKAFNASLGTYHDLRKILDKSFLDDKVNEKIIEDIIQTLTLFEDREMIRQRLQKYSDIFTTQQLKELERRHYTGWGRLSYKLINGIRNKENKKTILDYLIDDGYANRNFMQLINDDALSFKEEIARAQIIGDVDDIANVVHDLPGSPAIKKGILQSVKIVDELVKVMGHNPTNIIIEMARENQTTDKGRRNSQQRLKLLQDSLKNLDNPVNIKNVENQQLQNDRLFLYYIQNGKDMYTGETLDINNLSQYDIDHIIPQAFIKDNSLDNRVLTRSDKNRGKSDDVPSIEVVHEMKSFWSKLLSVKLITQRKFDNLTKAERGGLTENDKAGFIKRQLVETRQITKHVAQVLDARFNAKHDENKKVIRDVKIITLKSNLVSQFRKDFKFYKVREINDYHHAHDAYLNAVIGTALLKKYPKLASEFVYGEFKKYDVRKFIAKSDKEIGKATAKYFFYSNLMNFFKKEVKFADGTVVERPDIETSEDGEIAWNKQTDFKIVRKVLSYPQVNIVKKTEVQTHGLDRGKPRGLFNANPSPKPKPDSSENLVGIKRNLDPKKYGGYAGISNSYAVLVKAIIEKGVKKKETMVLEFQGISILDRITFEKDKRAFLLGKGYKDIKKIIELPKYSLFELKDGSRRMLASILSTNNKRGEIHKGNELFVPQKFTTLLYHAKRINNPINKDHIEYVKKHRDDFKELLNYVLEFNEKYVGATKNGERLKEAVADFDSKSNEEICTSFLGAVNSKNAGLFELTSLGSASDFEFLGVKIPRYRDYTPSSLLKDSILIHQSITGLYETRIDLSKLGED

SEQ ID NO: 18 - protein, 1367 aa, Streptococcus pyogenes
MDKKYSIGLDIGTNSVGWAVITDDYKVPSKKFKVLGNTDRHSIKKNLIGALLFGSGETAEATRLKRTARRRYTRRKNRICYLQEIFSNEMAKVDDSFFHRLEESFLVEEDKKHERHPIFGNIVDEVAYHEKYPTIYHLRKKLADSTDKADLRLIYLALAHMIKFRGHFLIEGDLNPDNSDVDKLFIQLVQIYNQLFEENPINASRVDAKAILSARLSKSRRLENLIAQLPGEKRNGLFGNLIALSLGLTPNFKSNFDLAEDAKLQLSKDTYDDDLDNLLAQIGDQYADLFLAAKNLSDAILLSDILRVNSEITKAPLSASMIKRYDEHHQDLTLLKALVRQQLPEKYKEIFFDQSKNGYAGYIDGGASQEEFYKFIKPILEKMDGTEELLVKLNREDLLRKQRTFDNGSIPHQIHLGELHAILRRQEDFYPFLKDNREKIEKILTFRIPYYVGPLARGNSRFAWMTRKSEETITPWNFEEVVDKGASAQSFIERMTNFDKNLPNEKVLPKHSLLYEYFTVYNELTKVKYVTEGMRKPAFLSGEQKKAIVDLLFKTNRKVTVKQLKEDYFKKIECFDSVEISGVEDRFNASLGAYHDLLKIIKDKDFLDNEENEDILEDIVLTLTLFEDRGMIEERLKTYAHLFDDKVMKQLKRRRYTGWGRLSRKLINGIRDKQSGKTILDFLKSDGFANRNFMQLIHDDSLTFKEDIQKAQVSGQGHSLHEQIANLAGSPAIKKGILQTVKIVDELVKVMGHKPENIVIEMARENQTTQKGQKNSRERMKRIEEGIKELGSQILKEHPVENTQLQNEKLYLYYLQNGRDMYVDQELDINRLSDYDVDHIVPQSFIKDDSIDNKVLTRSDKNRGKSDNVPSEEVVKKMKNYWRQLLNAKLITQRKFDNLTKAERGGLSELDKAGFIKRQLVETRQITKHVAQILDSRMNTKYDENDKLIREVKVITLKSKLVSDFRKDFQFYKVREINNYHHAHDAYLNAVVGTALIKKYPKLESEFVYGDYKVYDVRKMIAKSEQEIGKATAKYFFYSNIMNFFKTEITLANGEIRKRPLIETNGETGEIVWDKGRDFATVRKVLSMPQVNIVKKTEVQTGGFSKESILPKRNSDKLIARKKDWDPKKYGGFDSPTVAYSVLVVAKVEKGKSKKLKSVKELLGITIMERSSFEKNPIDFLEAKGYKEVKKDLIIKLPKYSLFELENGRKRMLASAGELQKGNELALPSKYVNFLYLASHYEKLKGSPEDNEQKQLFVEQHKHYLDEIIEQISEFSKRVILADANLDKVLSAYNKHRDKPIREQAENIIHLFTLTNLGAPAAFKYFDTTIDRKRYTSTKEVLDATLIHQSITGLYETRIDLSQLGGD

SEQ ID NO: 19 - protein, 1345 aa, Streptococcus mutans
MKKPYSIGLDIGTNSVGWAVVTDDYKVPAKKMKVLGNTDKSHIEKNLLGALLFDSGNTAEDRRLKRTARRRYTRRRNRILYLQEIFSEEMGKVDDSFFHRLEDSFLVTEDKRGERHPIFGNLEEEVKYHENFPTIYHLRQYLADNPEKVDLRLVYLALAHIIKFRGHFLIEGKFDTRNNDVQRLFQEFLAVYDNTFENSSLQEQNVQVEEILTDKISKSAKKDRVLKLFPNEKSNGRFAEFLKLIVGNQADFKKHFELEEKAPLQFSKDTYEEELEVLLAQIGDNYAELFLSAKKLYDSILLSGILTVTDVGTKAPLSASMIQRYNEHQMDLAQLKQFIRQKLSDKYNEVFSDVSKDGYAGYIDGKTNQEAFYKYLKGLLNKIEGSGYFLDKIEREDFLRKQRTFDNGSIPHQIHLQEMRAIIRRQAEFYPFLADNQDRIEKLLTFRIPYYVGPLARGKSDFAWLSRKSADKITPWNFDEIVDKESSAEAFINRMTNYDLYLPNQKVLPKHSLLYEKFTVYNELIKVKYKTEQGKTAFFDANMKQEIFDGVFKVYRKVTKDKLMDFLEKEFDEFRIVDLTGLDKENKVFNASYGTYHDLCKILDKDFLDNSKNEKILEDIVLTLTLFEDREMIRKRLENYSDLLTKEQVKKLERRHYTGWGRLSAELIHGIRNKESRKTILDYLIDDGNSNRNFMQLINDDALSFKEEIAKAQVIGETDNLNQVVSDIAGSPAIKKGILQSLKIVDELVKIMGHQPENIVVEMARENQFTNQGRRNSQQRLKGLTDSIKEFGSQILKEHPVENSQLQNDRLFLYYLQNGRDMYTGEELDIDYLSQYDIDHIIPQAFIKDNSIDNRVLTSSKENRGKSDDVPSKDVVRKMKSYWSKLLSAKLITQRKFDNLTKAERGGLTDDDKAGFIKRQLVETRQITKHVARILDERFNTETDENNKKIRQVKIVTLKSNLVSNFRKEFELYKVREINDYHHAHDAYLNAVIGKALLGVYPQLEPEFVYGDYPHFHGHKENKATAKKFFYSNIMNFFKKDDVRTDKNGEIIWKKDEHISNIKKVLSYPQVNIVKKVEEQTGGFSKESILPKGNSDKLIPRKTKKFYWDTKKYGGFDSPIVAYSILVIADIEKGKSKKLKTVKALVGVTIMEKMTFERDPVAFLERKGYRNVQEENIIKLPKYSLFKLENGRKRLLASARELQKGNEIVLPNHLGTLLYHAKNIHKVDEPKHLDYVDKHKDEFKELLDVVSNFSKKYTLAEGNLEKIKELYAQNNGEDLKELASSFINLLTFTAIGAPATFKFFDKNIDRKRYTSTTEILNATLIHQSITGLYETRIDLNKLGGD

SEQ ID NO: 20 - protein, 1370 aa, Streptococcus agalactiae
MNKPYSIGLDIGTNSVGYSVVTDDYKVPAKKMRVLGNTDKEYIKKNLIGALLFDGGNTASDRRLKRTARRRYTRRRNRILYLQEIFAEEMSKVDDSFFHRLEDSFLVEDDKRGSKYPIFATMQEEKDYHEKFPTIYHLRKELADKKEKANLRLVYLALAHIIKFRGHFLIEDDSFDVRNTDIQRQYQAFLEIFDTTFENNHLLSQNIDVEGILTDKISKSAKKDRILAQYPNQKSTGIFAEFLKLIVGNQADFKKHFNLEDKTPLQFAKDSYDEDLENLLGQIGDEFADLFSVAKKLYDSVLLSGILTVTDLSTKAPLSASMIQRYDEHREDLKQLKQFVKASLPEKYQEIFTDSSKDGYAGYIEGKTNQGAFYKYLSKLLTKQEGSEYFLEKIKNEDFLRKQRTFDNGSIPHQVHLTELKAIIRRQSEYYPFLKENLDRIEKILTFRIPYYVGPLAREKSDFAWMTRKTDDSIRPWNFEELVDKEASAEAFIHRMTNNDLYLPEEKVLPKHSLIYEKFTVYNELTKVRYKNEQGETYFFDSNIKQEIFDGVFKEHRKVSKKKLLDFLAKEYEEFRIVDVIGLDKENKAFNASLGTYHDLKKILDKDFLDNPDNESILEDIVQTLTLFEDREMIKKRLENYKDLFTESQLKKLYRRHYTGWGRLSAKLINGIRDKESQKTILDYLISDGRANRNFMQLIHDDGLSFKPIIDKAQAGSHSDNLKEVVGELAGSPAIKKGILQSLKIVDELVKVMGYEPEQVVVEMARENQTTNQGRRNTRQRYKLLEEGVKNLASDLNGNILKEYPTDNQALQNERLFLYYLQNGRDMYTGEALDIDNLSQYDIDHIVPQAFIKDDSIDNRVLVSSAKNRGKSDNVPSIDIVKARKAFWKKLLDAKLMSQRKYDNLTKAERGGLTSDDKARFIQRQLVETRQITKHVARILDERFNNELDSKGRRIRKVKIVTLKSNLVSNFRKEFGFYKIREVNDYHHAHDAYLNAVVAKAILTKYPQLEPEFVYGDYPKYNSYKTRKSATEKLFFYSNIMNFFKTKVTLADGTVVVKDDIEVNNDTGEIVWDKKKHFATVRKVLSYPQVNIVKKTEIQTGGFSKESILAHGNSDKLIPRKTKDIYLDPKKYGGFDSPIVAYSVLVVADIKKGKAQKLKTVTELLGITIMERFRFEKNPSAFLESKGYLNIRDDKLMILPKYSLFELENGRRRLLASAGELQKGNELALPTQYMKFLYLASRYNELKGKPEEIEQKQEFVVQHVSYFDDILQIINDFSNRVILADANLEKINKLYQDNKENISVDELANNIINLFTFTSLGAPAAFKFFDKIVDRKRYTSTKEVLNSTLIHQSITGLYETRIDLGKLGED

SEQ ID NO: 21 - protein, 1385 aa, Streptococcus salivarius
MTKPYSIGLDIGTNSVGWAVITDDYKVPSKKMKVLGNTSKKYIKKNLLGALLFDSGITAEGRRLKRTARRRYTRRRNRILYLQEIFSTEMATLDDAFFQRLDDSFLVPDDKRDSKYPIFGNLVEEKVYHDEFPTIYHLRKHLADSSKKADLRLVYLALAHMIKYRGHFLIEGDFNSKNNDLQKNFQDFLDTYNAIFESDLSLENSKQLEEIVKDKISKSAKKDRILKLFPGEKNSGIFSEFLKLIVGNQADFRKYFNLDEKTSLQFSKESYDEDLETLLGHIGDDYSDVFLKAKKLYDAILLSGILTVTDNGTEAPLSSAMIMRYKEHEEDLALLKAYIRNISLETYNEVFKDNTKNGYAGYIDGKTSQEDFYVYLKRLLAGLEGADYFLEKIDREDFLRKQRTFDNGSIPYQIYLQEMRAILDKQAKFYPFLAKNKERIEKILTFRIPYYVGPLARGNSDFAWSIRKRNEKITPWNFEDVIDKESSAEAFINRMTSFDLYLPEEKVLPKHSLLYENFTVYNELTKVRFIAEGMRDYQFLDSKQKKDIVRLYFKGKRKVTDKDIIEYLHAIDGYDGIELKGIEKQFNSSLSTYHDLLNIINDKEFLDDSSNETIIEEIIHTLTMFEDREMIKQRLSKFDNIFDKSVLKKLSRRHYTGWGKLSAKLINGIRDEKSGNTILDYLIDDGVSNRNFMQLIHDDALSFKKKIKKAQIIGDKDNIKQVVKSLPGSPAIKKGILQSIKIVDELVKVMGREPESIVVEMARENQYTNQGKSNSQQRLKRLEESLKGLGSKILKENVPTRLSKIDNNALQNDRLYLYYLQNGKDMYTGEELDIDRLSNYDIDHIIPQAFLKDDSIDNKVLVSSASNRGKSDDVPSLEVVKKRKTLWYQLLKSKLISQRKFDNLTKAERGGLSQEEKAGFIQRQLVETRQITKHVARLLDERFNNKKDENNRTLRTVKIITLKSSLVSQFRKDFELYKVREINDFHHAHDAYLNAVVASALLKKYPKLEPEFVYGDYPKYNSFRERKSATEKVYFYSNIMNIFKKSIPLADGTVIDRPLIEVNEETGESVWNKVADLNTVRKVLSYSQVNIVKKVEEQNHGLDRGKPKGLFNANLSSKPKPNSKENLVGAKEYLDPKKYGGYAGISNSFAILVKGTIEKGAKKKITNVLEFQGISILDRIYYRKDKLNFLLEKGYKDIELIIELPKYSLFELSDGSRRMLASILSTNNKRGEIHKGNQIFISQKFVKLLYHAKRISSTFNENHRKYVENHKKEFEELFYYILEFNENYVGAKKNGELLKSAFQSWQNHSIDELCSSFIGPTGSERKGLFELTSRGGAADFEFLGVKIPRYRDYTPSSLLKDATLIHQSVTGLYETRIDLGKLGED

SEQ ID NO: 22 - protein, 1392 aa, Streptococcus sanguinis
MENKNYSIGLDIGTNSVGWAVITDDYKVPSKKMKVFGNTDKHFIKKNLIGALLFDEGATAEDRRLKRTARRRYTRRKNRLRYLQEIFSEEISKLDSSFFHRLDDSFLVPKDKRGSKYPIFATLEEEKEYHKKFPTIYHLRKHLADSKEKTDLRLIYLALAHMIKYRGHFLYEESFDIKNNDIQKIFNEFISIYDNTFEGSSLSGQNAQVEAIFTDKISKSAKRERVLKLFSDEKSTSLFSEFLKLIVGNQADFKKHFDLEEKAPLQFSKDTYDEDLENLLGQIGDGFTDLFLVAKKLYDAILLSGILTVTDPSTKAPLSASMIERYESHQKDLAALKQFIKNNLPKRYNEVFSDQSKDGYAGYIDGKTTQEAFYKYIKNLLSKFEGADYFLDKIEREDFLRKQRTFDNGSIPHQIHLQEMNAILRRQGEHYPFLKENREKIEKILTFRIPYYVGPLARGNRDFAWLTRNSDQAIRPWNFEEIVDKASSAEEFINKMTNYDLYLPEEKVLPKHSLLYETFAVYNELTKVKFIAEGLRDYQFLDSGQKKQIVNQLFKEKRKVTEKDIIHYLHNVDGYDGIELKGIEKQFNASLSTYHDLLKIIKDKEFMDDPKNEEILENIVHTLTIFEDREMIKQRLAQYDSIFDEKVIKALTRRHYTGWGKLSAKLINGICDKQTGDTILDYLIDDGKINRNFMQLINDDGLSFKEIIQKAQVVGKTDDVKQVVQELPGSPAIKKGILQSIKIVDELVKVMGYAPESIVIEMARENQTTARGKKNSQQRYKRIEDSLKNLAPGLDSNILKENPTDNIQLQNDRLFLYYLQNGKDMYTGKPLDIDQLSSYDIDHIIPQAFIKDDSIDNRVLTSSKDNRGKSDNVPSLEVVQKRKAFWQQLLDSKLISERKFNNLTKAERGGLDERDKVGFIRRQLVETRQITKHVAQILDASFNTEVNEKNQKIRTVKIITLKSNLVSNFRKEFELYKVREINDYHHAHDAYLNAVVAKAILKKYPKLEPEFVYGDYQKYDLKRYISRFKPSKEIEKATEKYFFYSNLLNFFKEEVHYADGIIVKRENIEYSKDTGEIAWNKEKDFATIKKVLSYPQVNIVKKTEIQTHGLDRGKPKGLFNSNPSPKPSEDSKENLVPIKQGLDPRKYGGYAGISNSYAVLVKAIVEKGAKKQQKTILEFQGISILDKINFENNKENYLLKKRYIEILSTITLPKYSLFEFPDGTRRRLASILSTNNKRGEIHKGNELVLPGKYTTLLYHAKNINKKLEPEHLEYVEKHRNDFAKLLECVLNFNDKYVGALKNGERIRQAFTDWETVDIEKLCFSFIGPENSKNAGLFELTSQGSASDFEFLGVKIPRYRDYAPSSLLKATLIHQSITGLYETRIDLSKLGED

SEQ ID NO: 23 - protein, 1371 aa, Streptococcus sp.
MNNNNYSIGLDIGTNSVGWAVITDDYKVPSKKMRVLGNTDKRFIKKNLIGALLFDEGTTAEDRRLKRTARRRYTRRKNRLRYLQEIFAEEMSKVDSSFFHRLDDSFLVPEDKSGSKYPIFATLAEEKEYHKKFPTIYHLRKHLADSKEKADLRLIYLALAHITKYRGHFLYEEAFDIKNNDIQKIFNEFINIYDNTFEGSSLSGQNAQVEAIFTGKISKSVKREHVLKLFPDEKSTGLFSEFLKLIVGNQADFKKHFDLEEKASLQFSKDTYDEDLENLLGQIGDDFADLFLVAKKLYDAILLSGILTVTDPSTKAPLSASMIERYENHQEDLAALKQFIKNNLPEKYAEVFSDQSKDGYAGYIDGKTTQEAFYKYIKNLLSKFEGADYFLDKIEREDFLRKQRTFDNGSIPHQIHLQEMNAILRRQGEHYPLLKENKEKIEKILTFRIPYYVGPLARGNRDFAWLTRNSDQAIRPWNFEEIVDKASSAESFINKMTNYDLYLPEEKVLPKHSLLYETFAVYNELTKVKFIAEGLRDYQFFDSGQKKQIVNQLFKEKRKVTEKDIIHYLHNVDGYDGIELKGIEKQFNASLSTYHDLLKIIKDKEFMDNHKNQEILENIVHTLTIFEDREMIKQRLAQYDSIFDEKVIKALTRRHYTGWGKLSAKLINGICDKKTGKTILDYLIDDGYNNRNFMQLINDDGLSFKEIIQKAQVVGKTDDLTQVVRELSGSPAIKKGILQSIKIVDELVKIMGYAPESIVIEMARENQTTAKGKKNSQQRYKRIEDALKNLAPGLDSTISKENPTDNIQLQNDRLFLYYLQNGKDMYTGEALDINQLSSYDIDHIIPQAFIKDDSLDNRVLTSSKDNRGKSDNVPSLEVVKKRKAFWQQLLDSKLISERKFNNLTKAERGGLDERDKVGFIKRQLVETRQITKHVARILDARFNTEVSEKNQKIRSVKIITLKSNLVSNFRKEFKLYKVREINDYHHAHDAYLNAVVAKAILKKYPKLEPEFVYGDYQKYDLKRYISKSKDPKEVEKATEKYFFYSNLLNFFKEEVHYADGTIVKRENIEYSKDTGEIAWNKEKDFVTIKKVLSYPQVNIVKKREVQTGGFSKESILPKGNSDKLIPRKTKDILWDTTKYGGFDSPVIAYSILLIADIEKGKAKKLKTVKTLVGITIMEKAAFEKNPITFLENKGYHNVRKENILCLPKYSLFELENGRRRLLASAKELQKGNEIVLPVYLTTLLYHSKNVHKLDEPEHLEYIQKHRYEFKDLLNLVSEFSQKYVLAEANLEKIKSLYVDNEQADIEILANSFINLLTFTALGAPAAFKFFGKDVDRKRYTTVSEILNATLIHQSITGLYETRIDLSKLGED

SEQ ID NO: 24 - protein, 1370 aa, Streptococcus gallolyticus
MTKKNYSIGLDIGTNSVGWAVITDDYKVPAKKMKVLGNTDKKYIKKNLLGALLFDSGETAEATRLKRTARRRYTRRKNRLRYLQEIFAEEMTKVDESFFYRLDESFLTTDEKDFERHPIFGNKAEEDAYHQKFPTIYHLRNYLADSSEKADLRLVYLALAHMIKYRGHFLIEGKLNAENTDVQKLFTDFVGVYDRTFDDSHLSEITVDVASTLTEKISKSRRLENLIKYYPTEKKNTLFGNLIALALGLQPNFKMNFKLSEDAKLQFSKDTYEEDLEELLGKIGDDYADLFTSAKNLYDAILLSGILTVDDNSTKAPLSASMIKRYVEHHEDLEKLKEFIKANKSELYHDIFKDKNKNGYAGYIENGVKQDEFYKYLKNTLSKIDGSDYFLDKIEREDFLRKQRTFDNGSIPHQIHLQEMHAILRRQGDYYPFLKEKQDRIEKILTFRIPYYVGPLVRKDSRFAWAEYRSDEKITPWNFDKVIDKEKSAEKFITRMTLNDLYLPEEKVLPKHSHVYETYAVYNELTKIKYVNEQGKESFFDSNMKQEIFDHVFKENRKVTKEKLLNYLNKEFPEYRIKDLIGLDKENKSFNASLGTYHDLKKILDKAFLDDKVNEEVIEDIIKTLTLFEDKDMIHERLQKYSDIFTANQLKKLERRHYTGWGRLSYKLINGIRNKENNKTILDYLIDDGSANRNFMQLINDDTLPFKQIIQKSQVVGDVDDIEAVVHDLPGSPAIKKGILQSVKIVDELVKVMGDNPDNIVIEMARENQTTNRGRSQSQQRLKKLQSSLKELGSNILNEEKPSYIEDKVENSHLQNDQLFLYYIQNGKDMYTGDELDIDHLSDYDIDHIIPQAFIKDDSIDNRVLTSSAKNRGKSDDVPSLDIVRARKAEWVRLYKSGLISKRKFDNLTKAERGGLTEADKAGFIKRQLVETRQITKHVAQILDARFNTEHDENDKVIRDVKVITLKSNLVSQFRKDFEFYKVREINDYHHAHDAYLNAVVGTALLKKYPKLASEFVYGEYKKYDIRKFITNSSDKATAKYFFYSNLMNFFKTKVKYADGTVFERPIIETNADGEIAWNKQIDFEKVRKVLSYPQVNIVKKVETQTGGFSKESILPKGDSDKLIPRKTKKVYWDTKKYGGFDSPTVAYSVFVVADVEKGKAKKLKTVKELVGISIMERSFFEENPVEFLENKGYHNIREDKLIKLPKYSLFEFEGGRRRLLASASELQKGNEMVLPGYLVELLYHAHRADNFNSTEYLNYVSEHKKEFEKVLSCVEDFANLYVDVEKNLSKIRAVADSMDNFSIEEISNSFINLLTLTALGAPADFNFLGEKIPRKRYTSTKECLTATLIHQSITGLYETRIDLSKLGEE

SEQ ID NO: 25 - protein, 1371 aa, Streptococcus dysgalactiae
MDKKYSIGLDIGTNSVGWAVITDDYKVPSKKFKVLGNTDRHSIKKNLIGALLFDSGETAEATRLKRTARRRYTRRKNRIRYLQEIFSSEMSKVDDSFFHRLEESFLVEEDKKHERHPIFGNIVDEVAYHEKYPTIYHLRKKLADSTDKADLRLIYLALAHMIKFRGHFLIEGDLNPDNSDMDKLFIQLVQTYNQLFEENPINASRVDAKAILSARLSKSRRLENLIAQLPGEKRNGLFGNLIALSLGLTPNFKSNFDLAEDAKLQLSKDTYDDDLDNLLAQIGDQYADLFLAAKNLSDAILLSDILRVNSEITKAPLSASMIKRYDEHHQDLTLLKALVRQQLPEKYKEIFFDQSKNGYAGYIDGGASQEEFYKFIKPILEKMDGTEELLAKLNREDLLRKQRTFDNGSIPHQIHLGELHAILRRQEDFYPFLKDNREKIEKILTFRIPYYVGPLARGNSRFAWMTRKSEETITPWNFEEVVDKGASAQSFIERMTNFDKNLPNEKVLPKHSLLYEYFTVYNELTKVKYVTEGMRKPEFLSGKQKEAIVDLLFKTNRKVTVKQLKEDYFKKIECFDSVEISGVEDRFNASLGTYHDLLKIIKDKDFLDNEENEDILEDIVLTLTLFEDKEMIEERLKTYAHLFDDKVMKQLKRRHYTGWGRLSRKLINGIRDKQSGKTILDFLKSDGFANRNFIQLIHDDSLTFKEAIQKAQVSGQGHSLHEQIANLAGSPAIKKGILQSVKVVDELVKVMGHKPENIVIEMARENQTTQKGQKNSRERMKRIEEGIKELGSQILKEHPVENTQLQNEKLYLYYLQNGRDMYVDQELDINRLSDYDVDHIVPQSFIKDDSIDNKVLTRSDKNRGKSDDVPSEEVVKKMKNYWRQLLNAKLITQRKFDNLTKAERGGLSELDKAGFIKRQLVETRQITKHVAQILDSRMNTKYDENDKLIREVKVITLKSKLVSDFRKDFQFYKVREINNYHHAHDAYLNAVVGTALIKKYPKLESEFVYGDYKVYDVRKMIAKSEQEIGKATAKRFFYSNIMNFFKTEITLANGEIRKRPLIETNEETGEIVWNKGRDFATVRKVLSMPQVNIVKKTEVQTGALTNESIYARGSFDKLISRKHRFESSKYGGFGSPTVTYSVLVVAKSKVQDGKVKKIKTGKELIGITLLDKLVFEKNPLKFIEDKGYGNVQIDKCIKLPKYSLFEFENGTRRMLASVMANNNSRGDLQKANEMFLPAKLVTLLYHAHKIESSKELEHEAYILDHYNDLYQLLSYIERFASLYVDVEKNISKVKELFSNIESYSISEICSSVINLLTLTASGAPADFKFLGTTIPRKRYGSPQSILSSTLIHQSITGLYETRIDLSQLGGD

SEQ ID NO: 26 - protein, 1370 aa, Streptococcus agalactiae; identical to SEQ ID NO: 10

SEQ ID NO: 27 - protein, 1345 aa, Streptococcus mutans
MKKPYSIGLDIGTNSVGWAVVTDDYKVPAKKMKVLGNTDKSHIKKNLLGALLFDSGNTAEDRRLKRTARRRYTRRRNRILYLQEIFSEEMGKVDDSFFHRLEDSFLVTEDKRGERHPIFGNLEEEVKYHENFPTIYHLRQYLADNPEKTDLRLVYLALAHIIKFRGHFLIEGKFDTRNNDVQRLFQEFLAVYDNTFENSSLQEQNVQVEEILTDKISKSAKKDRVLKLFPNEKSNGRFAEFLKLIVGNQADFKKHFELEEKAPLQFSKDIYEEELEVLLAQIGDNYAELFLSAKKLYDSILLSGILTVTDVSTKAPLSASMIQRYNEHQMDLAQLKQFIRQKLSDKYNEVFSDVSKDGYAGYIDGKTNQEAFYKYLKGLLNKIEGSGYFLDKIEREDFLRKQRTFDNGSIPHQIHLQEMRAIIRRQAEFYPFLADNQDRIEKILTFRIPYYVGPLARGKSDFAWLSRKSADKITPWNFDEIVDKESSAEAFINRMTNYDLYLPNQKVLPKHSLLYEKFTVYNELTKVKYKTEQGKTAFFDANMKQEIFDGVFKVYRKVTKDKLMDFLEKEFDEFRIVDLTGLDKENKAFNASYGTYHDLRKILDKDFLDNSKNEKILEDIVLTLTLFEDREMIRKRLENYSDLLTKEQVKKLERRHYTGWGRLSAELIHGIRNKESRKTLLDYLIDDGNSNRNFMQLINDDALSFKEEIAKAQVIGETDNLNQVVSDIAGSPAIKKGILQSLKIVDELVKIMGHQPENIVVEMARENQFTNQGQRNSQQRLKGLTDSIKEFGSQILKEHPVENSQLQNDRLFLYYLQNGRDMYTGEELDIDYLSQYDIDHIIPQAFIKDNSIDNRVLTSSKENRGKSDDVPSKDVVRKMKSYWSKLLSAKLITQRKFDNLTKAERGGLTDDDKAGFIKRQLVETRQITKHVARILDERFNTETDENNKKIRQVKIVTLKSNLVSNFRKEFELYKVREINDYHHAHDAYLNAVIGKALLGVYPQLEPEFVYGDYPHFHGHKENKATAKKFFYSNIMNFFKKDDVRTDKNGEIIWKKDEYISNIKKVLSYPQVNIVKKVEEQTGGFSKESILPKGDSDKLIPRKTKKFYWDTKKYGGFDSPIVAYSILVIADIEKGKSKKLKTVKALVGVTIMEKMTFERDPVAFLERKGYRNVQEENIIKLPKYSLFKLENGRKRLLASARELQKGNEIVLPDHLGTLLYHAKNIHKVDEPKHLDYVDKHKDEFKELLDVVSNFSKKYTLAEGNLEKIKELYAQNNGEDLKELASSFINLLTFTAIGAPATFKFFDKNIDRKRYTSTTEILNATLIHQSITGLYETRIDLSKLGGD

SEQ ID NO: 28 - protein, 1345 aa, Streptococcus mutans
MKKPYSIGLDIGTNSVGWAVVTDDYKVPAKKMKVLGNTDKSHIKKNLLGALLFDSGNTAEDRRLKRTARRRYTRRRNRILYLQEIFSEEMGKVDDSFFHRLEDSFLVTEDKRGERHPIFGNLEEEVKYHENFPTIYHLRQYLADNPEKVDLRLVYLALAHIIKFRGHFLIEGKFDTRNNDVQRLFQEFLAVYDNTFENSSLQEQNVQVEEILTDKISKSAKKDRVLKLFPNEKSNGRFAEFLKLIVGNQADFKKHFELEEKAPLQFSKDTYEEDLEELLGKIGDDYADLFTLAKNLYDAILLSGILTADDSSTKAPLSASMIQRYNEHQMDLAQLKQFIRQKLSDKYNEVFSDVSKDGYAGYIDGKTNQEAFYKYLKGLLNKIEGSGYFLDKIEREDFLRKQRTFDNGSIPHQIHLQEMRAIIRRQAEFYPFLADNQDRIEKILTFRIPYYVGPLARGKSDFAWLSRKSADKITPWNFDEIVDKESSAEAFINRMTNYDLYLPNQKVLPKHSLLYEKFTVYNELTKVKYKTEQGKTAFFDANMKQEIFDGVFKVYRKVTKDKLMDFLEKEFDEFRIVDLTGLDKENKVFNASYGTYHDLCKILDKDFLDNSKNEKILEDIVLTLTLFEDREMIRKRLENYSDLLTKEQVKKLERRHYTGWGRLSAELIHGIRNKESRKTILDYLIDDGNSNRNFMQLINDDALSFKEEIAKAQVIGETDNLNQVVSDIAGSPAIKKGILQSLKIVDELVKIMGHQPENIVVEMARENQFTNQGRRNSQQRLKGLTDSIKEFGSQILKEHPVENSQLQNDRLFLYYLQNGRDMYTGEELDIDYLSQYDIDHIIPQAFIKDNSIDNRVLTSSKENRGKSDDVPSKDVVRKMKPYWSKLLSAKLITQRKFDNLTKAERGGLTDDDKAGFIKRQLVETRQITKHVARILDERFNTETDENNKKIRQVKIVTLKSNLVSNFRKEFELYKVREINDYHHAHDAYLNAVIGKALLGVYPQLEPEFVYGDYPHFHGHEENKATAKKFFYSNIMNFFKKDDVRTDKNGEIIWKKDEHISNIKKVLSYPQVNIVKKVEEQTGGFSKESILPKGNSDKLIPRKTKKFYWDTKKYGGFDSPIVAYSILVIADIEKGKSKKLKTVKALVGVTIMEKMTFERDPVAFLERKGYRNVQEENIIKLPKYSLFKLENGRKRLLASARELQKGNEIVLPNHLGTLLYHAKNIHKVDEPKHLDYVDKHKDEFKELLDVVSNFSKKYTLAEGNLEKIKELYAQNNGEDLKELASSFINLLTFTAIGAPATFKFFDKNIDRKRYTSTTEILNATLIHQSITGLYETRIDLSKLGGD

SEQ ID NO: 29 - protein, 1377 aa, Streptococcus sanguinis
MKKPYSIGLDIGTNSVGWAVITDDYKVPSKKMKVLGNTDKHFIKKNLIGALLFDEGTTAEDRRLKRTSRRRYTRRKNRLRYLQEIFSEEISKLDSSFFHRLDDSFLVPEDKRGSKYPIFATLEEEKEYHKKFPTIYHLRKHLADSKEKTDLRLIYLALAHMIKYRGHFLYEESFDIKNNDIQKIFNEFISIYDNTFEGSSLSGQNAQVEAIFTDKISKSTKRERVLKLFSDEKSTGLFSEFLKLIVGNQADFKKHFDLEEKAPLQFSKDTYDEDLENLLGQIGDGFADLFLVAKKLYDAILLSGILTVTDPSTKAPLSASMIERYENHQEDLAALKQFIKNNLSEKYAEVFSDQSKDGYAGFIDGKTTQEAFYKYIKNLLSKLEGADYFLNKIEREDFLRKQRTFDNGSIPHQIHLQEMNAILRRQGEHYLFLKENREKIEKILAFRIPYYVGPLARGNRDFAWLTRNSDQAIRPWNFEEVVDKASSAEDFINKMTNYDLYLPEEKVLPKHSLLYETFAVYNELTKVKFIAEGLRDYQFLDSGQKKQIVNQLFKDKRKVTEKDIIHYLHNVDGYDGIELKGIEKQFNASLSTYHDLLKIIKDKEFMDNPKNGEILENIIHTLTIFEDREMIKQRLAQYDTLFDEKVIKALTRRHYTGWGKLSAKLINGIRDKQTGKTILEYLIDDGDCNRNFMQLINDDGLSFKEIIQKAQVVGKTDDVKQVVQEIPGSPAIKKGILQSIKIVDELVKVMGHNPESIVIEMARENQTTAKGKKNSQQRYKRIEDALKNLAPGLDSNILKENPTDNIQLQNDRLFLYYLQNGKDMYTGKAIDINQLSNYDIDHIIPQAFIKDDSLDNRVLTSSKDNRGKSDNVPSIEVVQKRKAFWQQLLDSKLISERKFNNLTKAKRGGLDERDKVGFIKRQLVETRQITKHVAQLLDTRFNTEVNEENQKIRTVKIITLKSNLVSNFRKEFGLYKVREINDYHHAHDAYLNAVVAKAILKKYPKLEPEFVYGDYQKYDLKRYILKSKASNTIDKATEKYFFYSNLLNFFKEKVRYADGTIKKRENIEYSNDTGEIAWNKEKDFATIKKVLSLPQVNIVKKTEEQTVGQNGGLFDNNIVSKKKVVDASKLIPIKSSLSPEKYGGYARPTIAYSVLVIADIEKGKGKAKKLKRIKEIVGITIQDKKKFESNPVTYLEECGYKNINSNLIIKLPKYSLFEFNDGQRRLLASSIELQKGNELILPYHLTALLYHAQRINKISEPIHKQYVEAHQNEFKELLTTIISLSKKYIQKPNVELLLQQAFDQADKDIYQLSESFISLLKLTSFGAPGAFKFLGVEISQSSVRYKPNSQFLDTTLIHQSITGLYETRIDLSKLGED

SEQ ID NO: 30 - protein, 1345 aa, Streptococcus mutans
MKKPYSIGLDIGTNSVGWAVVTDDYKVPAKKMKVLGNTDKSHIKKNLLGALLFDSGNTAADRRLKRTARRRYTRRRNRILYLQEIFAEEMSKVDDSFFHRLEDSFLVTEDKRGERHPIFGNLEEEVKYHENFPTIYHLRQYLADNPEKVDLRLVYLALAHIIKFRGHFLIEGKFDTRNNDVQRLFQEFLAVYDNTFENSSLQEQNVQVEEILTDKISKSAKKDRVLKLFPNEKSNGRFAEFLKLIVGNQADFKKHFELEEKAPLQFSKDTYEEELEVLLAQIGDNYAELFLSAKKLYDSILLSGILTVTDVSTKAPLSASMIQRYNEHQMDLAQLKQFIRQKLSDKYNEVFSDVSKDGYAGYIDGKTNQEAFYKYLKGLLNKIEGSGYFLDKIEREDFLRKQRTFDNGSIPHQIHLQEMRAIIRRQAEFYPFLADNQDRIEKILTFRIPYYVGPLARGKSDFAWLSRKSADKITPWNFDEIVDKESSAEAFINRMTNYDLYLPNQKVLPKHSLLYEKFTVYNELTKVKYKTEQGKTAFFDANMKQEIFDGVFKVYRKVTKDKLMDFLEKEFDEFRIVDLTGLDKENKAFNASYGTYHDLRKILDKDFLDNSKNEKILEDIVLTLTLFEDREMIRKRLENYSDLLTKEQVKKLERRHYTGWGRLSAELIHGIRNKESRKTILDYLIDDGNSNRNFMQLINDDALSFKEEIAKAQVIGETDNLNQVVSDIAGSPAIKKGILQSLKIVDELVKIMGHQPENIVVEMARENQFTNQGRRNSQQRLKGLTDSIKEFGSQILKEHPVEHSQLQNDRLFLYYLQNGRDMYTGEELDIDYLSQYDIDHIIPQAFIKDNSIDNRVLTSSKENRGKSDDVPSKNVVRKMKSYWSKLLSAKLITQRKFDNLTKAERGGLTDDDKAGFIKRQLVETRQITKHVARILDERFHTETDENNKKIRQVKIVTLKSNLVSNFRKEFELYKVREINDYHHAHDAYLNAVIGKALLGVYPQLEPEFVYGDYPHFHGHKENKATAKKFFYSNIMNFFKKDDVRTDKNGEIIWKKDEHISNIKKVLSYPQVNIVKKVEEQTGGFSKESILPKGNSDKLIPRKTKKFYWDTKKYGGFDSPIVAYSILVIADIEKGKSKKLKTVKALVGVTIMEKMTFERDPVAFLERKGYRNVQEENIIKLPKYSLFKLENGRKRLLASARELQKGNEIVLPNHLGTLLYHAKNIHKVDEPKHLDYVDKHKDEFKELLDVVSNFSKKYTLAEGNLEKIKELYAQNNGEDLKELASSFINLLTFTAIGAPATFKFFDKNIDRKRYTSTTEILNATLIHQSITGLYETRIDLSKLGGD

SEQ ID NO: 31 - protein, 1368 aa, Streptococcus pyogenes
MDKKYSIGLDIGTNSVGWAVITDDYKVPSKKFKVLGNTDRHSIKKNLIGALLFDSGETAEATRLKRTARRRYTRRKNRICYLQEIFSNEMAKVDDSFFHRLEESFLVEEDKKHERHPIFGNIVDEVAYHEKYPTIYHLRKKLVDSTDKADLRLIYLALAHMIKFRGHFLIEGDLNPDNSDVDKLFIQLVQTYNQLFEENPINASGVDAKAILSARLSKSRRLENLIAQLPGEKKNGLFGNLIALSLGLTPNFKSNFDLAEDAKLQLSKDTYDDDLDNLLAQIGDQYADLFLAAKNLSDAILLSDILRVNTEITKAPLSASMIKRYDEHHQDLTLLKALVRQQLPEKYKEIFFDQSKNGYAGYIDGGASQEEFYKFIKPILEKMDGTEELLVKLNREDLLRKQRTFDNGSIPHQIHLGELHAILRRQEDFYPFLKDNREKIEKILTFRIPYYVGPLARGNSRFAWMTRKSEETITPWNFEEVVDKGASAQSFIERMTNFDKNLPNEKVLPKHSLLYEYFTVYNELTKVKYVTEGMRKPAFLSGEQKKAIVDLLFKTNRKVTVKQLKEDYFKKIECFDSVEISGVEDRFNASLGTYHDLLKIIKDKDFLDNEENEDILEDIVLTLTLFEDREMIEERLKTYAHLFDDKVMKQLKRRRYTGWGRLSRKLINGIRDKQSGKTILDFLKSDGFANRNFMQLIHDDSLTFKEDIQKAQVSGQGDSLHEHIANLAGSPAIKKGILQTVKVVDELVKVMGRHKPENIVIEMARENQTTQKGQKNSRERMKRIEEGIKELGSQILKEHPVENTQLQNEKLYLYYLQNGRDMYVDQELDINRLSDYDVDHIVPQSFLKDDSIDNKVLTRSDKNRGKSDNVPSEEVVKKMKNYWRQLLNAKLITQRKFDNLTKAERGGLSELDKAGFIKRQLVETRQITKHVAQILDSRMNTKYDENDKLIREVKVITLKSKLVSDFRKDFQFYKVREINNYHHAHDAYLNAVVGTALIKKYPKLESEFVYGDYKVYDVRKMIAKSEQEIGKATAKYFFYSNIMNFFKTEITLANGEIRKRPLIETNGETGEIVWDKGRDFATVRKVLSMPQVNIVKKTEVQTGGFSKESILPKRNSDKLIARKKDWDPKKYGGFDSPTVAYSVLVVAKVEKGKSKKLKSVKELLGITIMERSSFEKNPIDFLEAKGYKEVKKDLIIKLPKYSLFELENGRKRMLASAGELQKGNELALPSKYVNFLYLASHYEKLKGSPEDNEQKQLFVEQHKHYLDEIIEQISEFSKRVILADANLDKVLSAYNKHRDKPIREQAENIIHLFTLTNLGAPAAFKYFDTTIDRKRYTSTKEVLDATLIHQSITGLYETRIDLSQLGGD

SEQ ID NO: 32 - protein, 1345 aa, Streptococcus mutans
MKKPYSIGLDIGTNSVGWAVVTDDYKVPAKKMKVLGNTDKSHIEKNLLGALLFDSGNTAEDRRLKRTARRRYTRRRNRILYLQEIFSEEMGKVDDSFFHRLEDSFLVTEDKRGERHPIFGNLEEEVKYHENFPTIYHLRQYLADNPEKVDLRLVYLALAHIIKFRGHFLIEGKFDTRNNDVQRLFQEFLAVYDNTFENSSLQEQNVQVEEILTDKISKSAKKDRVLKLFPNEKSNGRFAEFLKLIVGNQADFKKHFELEEKAPLQFSKDTYEEELEVLLAQIGDNYAELFLSAKKLYDSILLSGILTVTDVGTKAPLSASMIQRYNEHQMDLAQLKQFIRQKLSDKYNEVFSDVSKDGYAGYIDGKTNQEAFYKYLKGLLNKIEGSGYFLDKIEREDFLRKQRTFDNGSIPHQIHLQEMRAIIRRQAEFYPFLADNQDRIEKLLTFRIPYYVGPLARGKSDFAWLSRKSADKITPWNFDEIVDKESSAEAFINRMTNYDLYLPNQKVLPKHSLLYEKFTVYNELTKVKYKTEQGKTAFFDANMKQEIFDGVFKVYRKVTKDKLMDFLEKEFDEFRIVDLTGLDKENKVFNASYGTYHDLCKILDKDFLDNSKNEKILEDIVLTLTLFEDREMIRKRLENYSDLLTKEQVKKLERRHYTGWGRLSAELIHGIRNKESRKTILDYLIDDGNSNRNFMQLINDDALSFKEEIAKAQVIGETDNLNQVVSDIAGSPAIKKGILQSLKIVDELVKIMGHQPENIVVEMARENQFTNQGRRNSQQRLKGLTDSIKEFGSQILKEHPVENSQLQNDRLFLYYLQNGRDMYTGEELDIDYLSQYDIDHIIPQAFIKDNSIDNRVLTSSKENRGKSDDVPSKDVVRKMKSYWSKLLSAKLITQRKFDNLTKAERGGLTDDDKAGFIKRQLVETRQITKHVARILDERFNTETDENNKKIRQVKIVTLKSNLVSNFRKEFELYKVREINDYHHAHDAYLNAVIGKALLGVYPQLEPEFVYGDYPHFHGHKENKATAKKFFYSNIMNFFKKDDVRTDKNGEIIWKKDEHISNIKKVLSYPQVNIVKKVEEQTGGFSKESILPKGNSDKLIPRKTKKFYWDTKKYGGFDSPIVAYSILVIADIEKGKSKKLKTVKALVGVTIMEKMTFERDPVAFLERKGYRNVQEENIIKLPKYSLFKLENGRKRLLASARELQKGNEIVLPNHLGTLLYHAKNIHKVDEPKHLDYVDKHKDEFKELLDVVSNFSKKYTLAEGNLEKIKELYAQNNGEDLKELASSFINLLTFTAIGAPATFKFFDKNIDRKRYTSTTEILNATLIHQSITGLYETRIDLNKLGGD

SEQ ID NO: 33 - protein, 1345 aa, Streptococcus mutans
MKKPYSIGLDIGTNSVGWAVVTDDYKVPAKKMKVLGNTDKSHIKKNLLGALLFDSGNTAEDRRLKRTARRRYTRRRNRILYLQEIFSEEMGKVDDSFFHRLEDSFLVTEDKRGERHPIFGNLEEEVKYHENFPTIYHLRQYLADNPEKTDLRLVYLALAHIIKFRGHFLIEGKFDTRNNDVQRLFQEFLAVYDNTFENSSLQEQNVQVEEILTDKISKSAKKDRVLKLFPNEKSNGRFAEFLKLIVGNQADFKKHFELEEKAPLQFSKDIYEEELEVLLAQIGDNYAELFLSAKKLYDSILLSGILTVTDVSTKAPLSASMIQRYNEHQMDLAQLKQFIRQKLSDKYNEVFSDVSKDGYAGYIDGKTNQEAFYKYLKGLLNKIEGSGYFLDKIEREDFLRKQRTFDNGSIPHQIHLQEMRAIIRRQAEFYPFLADNQDRIEKILTFRIPYYVGPLARGKSDFAWLSRKSADKITPWNFDEIVDKESSVEAFINRMTNYDLYLPNQKVLPKHSLLYEKFTVYNELTKVKYKTEQGKTAFFDANMKQEIFDGVFKVYRKVTKDKLMDFLEKEFDEFRIVDLTGLDKENKAFNASYGTYHDLRKILDKDFLDNSKNEKILEDIVLTLTLFEDREMIRKRLKNYSDLLTKEQLKKLERRHYTGWGRLSAELIHGIRNKESRKTILDYLIDDGNSNRNFMQLINDDALSFKEEIAKAQVIGETDNLNQVVSDIAGSPAIKKGILQSLKIVDELVKIMGHQPENIVVEMARENQFTNQGRRNSQQRLKGLTDSIKEFGSQILKEHPVENSQLQNDRLFLYYLQNGRDMYTGEELDIDYLSQYDIDHIIPQAFIKDNSIDNRVLTSSKENRGKSDDVPSKDVVRKMKSYWSKLLSAKLITQRKFDNLTKAERGGLTDDDKAGFIKRQLVETRQITKHVARILDERFNTETDENNKKIRQVKIVTLKSNLVSNFRKEFELYKVREINDYHHAHDAYLNAVIGKALLGVYPQLEPEFVYGDYPHFHGHKENKATAKKFFYSNIMNFFKKDDVRTDKNGEIIWKKDEHISNIKKVLSYPQVNIVKKVEEQTGGFSKESILPKGNSYKLIPRKTKKFYWDTKKYGGFDSPIVAYSILVIADIEKGKSKKLKTVKALVGVTIMEKMTFERDPVAFLERKGYRNVQEENIIKLPKYSLFKLENGRKRLLASARELQKGNEIVLPNHLGTLLYHAKNIHKVDEPKHLDYVDKHKDEFKELLDVVSNFSKKYTLAEGNLEKIKELYAQNNGEDLKELASSFINLLTFTAIGAPAAFKFFDKNIDRKRYTSTTEILNATLIHQSITGLYETRIDLSKLGGD

SEQ ID NO: 34 - protein, 1359 aa, Streptococcus mutans
MKKPYSIGLDIGTNSVGWAVVTDDYKVPAKKMKVLGNTDKSHIKKNLLGALLFDSGNTAEDRRLKRTARRRYTRRRNRILYLQEIFAEEMMQVDESFFQRLDDSFLVEEDKRGSRYPIFGTLKEEKKYHKEFKTIYHLREKLANSTEKADLRLVYLSLAHMIKFRGHFLIEGQLKAENTNVQALFKDFVEVYDKTVEESHLSEMTVDALSILTEKVSKSRRLENLVECYPTEKKNTLFGNLIALSLGLQPNFKTNFQLSEDAKLQFSKDTYEEDLEGLLGEIGDEYADLFASAKNLYDAILLSGILAVDDNTTKAPLSASMVKRYKEHKEELAAFKRFIKEKLPKKYEEIFKDDTKNGYAGYVGADKKLRKRSGKLATEEEFYKYVKGILNKVEGADVWLDKIDREDFLRKQRTFDNGSIPHQIHLQEMHAILRRQGEHYPFLKENQDKIEKILTFRIPYYVGPLVRKGSRFAWAEYKADEKITPWNFDDILDKEKSAEKFITRMTLNDLYLPEEKVLPKHSLLYETFTVYNELTKVKYVNEQGEAKFFDANMKQEIFDHVFKENRKVTKDKLLNYLNKEFEEFRIVNLTGLDKENKVFNSSLGTYHDLRKILNKSFLDNKENEQIIEDIIQTLTLFEDREMIRQRLQKYSDIFTKAQLKKLERRHYTGWGRLSYKLINGIRDKQSNKTILGYLIDDGYSNRNFMQLINDDALSFKEEIAKAQVIGEMDGLNQVVSDIAGSPAIKKGILQSLKIVDELVKVMGHNPANIVIEMARENQTTAKGRRSSQKRYKRLEEAIKNLDHDLNHKILKEHPTDNQALQNDRLFLYYLQNGRDMYTEDPLDINRLSDYDIDHIIPQAFIKDNSIDNRVLTRSDKNRGKSDDVPSEEVVHKMKPFWSKLLSAKLITQRKFDNLTKAERGGLTDDDKAGFIKRQLVETRQITKHVARILDERFNTETDENNKKIRQVKIVTLKSNLVSNFRKEFELYKVREINDYHHAHDAYLNAVIGKALLGVYPQLEPEFVYGDYPHFHGHKENKATAKKFFYSNIMNFFKKGDVRTDKNGEIIWKKDEHISNIKKVLSYPQVNIVKKVEEQTGGFSKESILPKGNSDKLIPRKTKKFYWDTKKYGGFDSPIVAYSILVIADIEKGKSKKLKTVKALVGVTIMEKMTFERDPVAFLERKGYRNVQEENIIKLPKYSLFKLENGRKRLLASARELQKGNEIVLPNHLETLLYHAKNIHKVDEPKHLDYVDKHKDEFKELLDVVSNFSKKYTLAEGNLEKIKELYAQNNGEDLKELASSFINLLTFTAIGAPAAFKFFDKNIDRKRYTSTTEILNATLIHQSITGLYETRIDLNKLGGD

SEQ ID NO: 35 - protein, 1345 aa, Streptococcus mutans
MKKPYSIGLDIGTNSVGWAVVTDDYKVSAKKMKVLGNTDKSHIKKNLLGALLFDSGNTAEDRRLKRTARRRYTRRRNRILYLQEIFAEEMSKVDDSFFHRLEDSFLVTEDKRGERHPIFGNLEEEVKYHENFPTIYHLRQYLADNPEKVDLRLVYLALAHIIKFRGHFLIEGKFDTRNNDVQRLFQEFLAVYDNTFENSSLQEQNVQVEEILTDKISKSAKKDRVLKLFPNEKSNGRFAEFLKLIVGNQADFKKHFELEEKAPLQFSKDTYEEELEVLLAQIGDNYAELFLSAKKLYDSILLSGILTVTDVSTKAPLSASMIQRYNEHQMDLAQLKQFIRQKLSDKYNEVFSDVSKDGYAGYIDGKTNQEAFYKYLKGLLNKIEGSGYFLDKIEREDFLRKQRTFDNGSIPHQIHLQEMRAIIRRQAEFYPFLADNQDRIEKILTFRIPYYVGPLARGKSDFAWLSRKSADKITPWNFDEIVDKESSAEAFINRMTNYDLYLPNQKVLPKHSLLYEKFTVYNELTKVKYKTEQGKTAFFDANMKQEIFDGVFKVYRKVTKDKLMDFLEKEFDEFRIVDLTGLDKENKAFNASYGTYHDLRKILDKDFLDNSKNEKILEDIVLTLTLFEDREMIRKRLENYSDLLTKEQVKKLERRHYTGWGRLSAELIHGIRNKESRKTILDYLIDDGNSNRNFMQLINDDALSFKEEIAKAQVIGETDNLNQVVSDIAGSPAIKKGILQSLKIVDELVKIMGHQPENIVVEMARENQFTNQGRRNSQQRLKGLTDSIKEFGSQILKEHPVEHSQLQNDRLFLYYLQNGRDMYTGEELDIDYLSQYDIDHIIPQAFIKDNSIDNRVLTSSKENRGKSDDVPSKNVVRKMKSYWSKLLSAKLITQRKFDNLTKAERGGLTDDDKAGFIKRQLVETRQITKHVARILDERFHTETDENNKKIRQVKIVTLKSNLVSNFRKEFELYKVREINDYHHTHDAYLNAVIGKALLGVYPQLEPEFVYGDYPHFHGHKENKATAKKFFYSNIMNFFKKDDVRTDKNGEIIWKKDEHISNIKKVLSYPQVNIVKKVEEQTGGFSKESILPKGNSDKLIPRKTKKFYWDTKKYGGFDSPIVAYSILVIADIEKGKSKKLKTVKALVGVTIMEKMTFERDPVAFLERKGYRNVQEENIIKLPKYSLFKLENGRKRLLASARELQKGNEIVLPNHLGTLLYHAKNIHKVDEPKHLDYVDKHKDEFKELLDVVSNFSKKYTLAEGNLEKIKELYAQNNGEDLKELASSFINLLTFTAIGAPATFKFFDKNIDRKRYTSTTEILNATLIHQSITGLYETRIDLSKLGGD

SEQ ID NO: 36 - protein, 1345 aa, Streptococcus mutans
MKKPYSIGLDIGTNSVGWAVVTDDYKVPAKKMKVLGNTDKSHIKKNLLGALLFDSGNTAEDRRLKRTARRRYTRRRNRILYLQEIFSEEMGKVDDSFFHRLEDSFLVTEDKRGERHPIFGNLEEEVKYHENFPTIYHLRQYLADNPEKVDLRLVYLALAHIIKFRGHFLIEGKFDTRNNDVQRLFQEFLAVYDNTFENSSLQEQNVQVEEILTDKISKSAKKDRVLKLFPNEKSNGRFAEFLKLIVGNQADFKKHFELEEKAPLQFSKDTYEEELEVLLAQIGDNYAELFLSAKKLYDSILLSGILTVTDVSTKAPLSASMIQRYNEHQMDLAQLKQFIRQKLSDKYNEVFSDVSKDGYAGYIDGKTNQEAFYKYLKGLLNKIEGSGYFLDKIEREDFLRKQRTFDNGSIPHQIHLQEMRAIIRRQAEFYPFLADNQDRIEKILTFRIPYYVGPLARGKSDFAWLSRKSADKITPWNFDEIVDKESSAEAFINRMTNYDLYLPNQKVLPKHSLLYEKFTVYNELTKVKYKTEQGKTAFFDANMKQEIFDGVFKVYRKVTKDKLMDFLEKEFDEFRIVDLTGLDKENKVFNASYGTYHDLCKILDKDFLDNSKNEKILEDIVLTLTLFEDREMIRKRLENYSDLLTKEQVKKLERRHYTGWGRLSAELIHGIRNKESRKTILDYLIDDGNSNRNFMQLINDDALSFKEEIAKAQVIGETDNLNQVVSDIAGSPAIKKGILQSLKIVDELVKIMGHQPENIVVEMARENQFTKQGRRNSQQRLKGLTDSIKEFGSQILKEHPVENSQLQNDRLFLYYLQNGRDMYTGEELDIDYLSQYDIDHIIPQAFIKDNSIDNRVLTSSKENRGKSDDVPSKDVVRKMKSYWSKLLSAKLITQRKFDNLTKAERGGLTDDDKAGFIKRQLVETRQITKHVARILDERFYTETDENNKKIRQVKIVTLKSNLVSNFRKEFELYKVREINDYHHAHDAYLNAVIGKALLGVYPQLEPEFVYGDYPHFHGHKENKATAKKFFYSNIMNFFKKDDVRTDRNGEIIWKKDEHISNIKKVLSYPQVNIVKKVEEQTGGFSKESILPKGNSDKLIPRKTKKFYWDTKKYGGFDSPIVAYSILVIADIEKGKSKKLKTVKALVGVTIMEKMTFERDPVAFLERKGYRNVQEENIIKLPKYSLFKLENGRKRLLASARELQKGNEIVLPNHLGTLLYHAKNIHKVDEPKHLDYVDKHKDEFKELLDVVSNFSKKYTLAEGNLEKIKELYAQNNGEDLKELASSFINLLTFTAIGAPATFKFFDKNIDRKRYTSTTEILNATLIHQSITGLYETRIDLSKLGGD

SEQ ID NO: 37 - protein, 1345 aa, Streptococcus mutans
MKKPYSIGLDIGTNSVGWAVVTDDYKVPAKKMKVLGNTDKSHIKKNLLGALLFDSGNTAEDRRLKRTARRRYTRRRNRILYLQEIFSEEMGKVDDSFFHRLEDSFLVTEDKRGERHPIFGNLEEEVKYHENFPTIYHLRQYLADNPEKTDLRLVYLALAHIIKFRGHFLIEGKFDTRNNDVQRLFQEFLAVYDNTFENSSLQEQNVQVEEILTDKISKSAKKDRVLKLFPNEKSNGRFAEFLKLIVGNQADFKKHFELEEKAPLQFSKDIYEEELEVLLAQIGDNYAELFLSAKKLYDSILLSGILTVTDVSTKAPLSASMIQRYNEHQMDLAQLKQFIRQKLSDKYNEVFSDVSKDGYAGYIDGKTNQEAFYKYLKGLLNKIEGSGYFLDKIEREDFLRKQRTFDNGSIPHQIHLQEMRAIIRRQAEFYPFLADNQDRIEKILTFRIPYYVGPLARGKSDFAWLSRKSADKITPWNFDEIVDKESSAEAFINRMTNYDLYLPNQKVLPKHSLLYEKFTVYNELTKVKYKTEQGKTAFFDANMKQEIFDGVFKVYRKVTKDKLMDFLEKEFDEFRIVDLTGLDKENKAFNASYGTYHDLRKILDKDFLDNSKNEKILEDIVLTLTLFEDREMIRKRLKNYSDLLTKEQLKKLERRHYTGWGRLSAELIHGIRNKESRKTILDYLIDDGNSNRNFMQLINDDALSFKEEIAKAQVIGETDNLNQVVSDIAGSLAIKKGILQSLKIVDELVKIMGHQPENIVVEMARENQFTNQGRRNSQQRLKGLTDSIKEFGSQILKEHPVENSQLQNDRLFLYYLQNGRDMYTGEELDIDYLSQYDIDHIIPQAFIKDNSIDNRVLTSSKENRGKSDDVPSKDVVRKMKSYWSKLLSAKLITQRKFDNLTKGERGGLTDDDKAGFIKRQLVETRQITKHVARILDERFNTETDENNKKIRQVKIVTLKSNLVSNFRKEFELYKVREINDYHHAHDAYLNAVIGKALLGVYPQLEPEFVYGDYPHFHGHKENKATAKKFFYSNIMNFFKKDDVRTDKNGEIIWKKDEYISNIKKVLSYPQVNIVKKVEEQTGGFFKESILPKGDSDKLIPRKTKKFYWDTKKYGGFDSPIVAYSILVIADIEKGKSKKLKTVKALVGVTIMEKMTFERDPVAFLERKGYRNVQEENIIKLPKYSLFKLENGRKRLLASARELQKGNEIVLPNHLGTLLYHAKNIHKVDEPKHLDYVDKHKDEFKELLDVVSNFSKKYTLAEGNLEKIKELYAQNNGEDLKELASSFINLLTFTAIGAPATFKFFDKNIDRKRYTSTTEILNATLIHQSITGLYETRIDLSKLGGD

SEQ ID NO: 38 - protein, 1374 aa, Streptococcus pseudoporcinus
MKKRYSYSIGLDIGTNSVGWAVINEDYKVPAKKMTVFGNTDRKTIKKNLLGTVLFDSGETAQARRLKRTNRRRYTRRRYRLCQLQNIFATEMVKVDDTFFQRLSESFFYYQDKAFDKHPIFGNSKEERAYHKTYPTIYHLRKDLADRDQKADLRLIYLALSHIIKFRGHFLIEGKLNSENTDVQKLFIALVTVYNLLFEEEPIAGETCDAKALLTAKTSKSKRLESLISEFPGQKKNGLFGNLLALALGLRPNFKSNFGLSEDAKLQITKDTYEEELDNLLAEIGDHYADLFLAAKNLSDAILLSDILTLSDENTRAPLSASMIKRYEEHQEDLALLKKLVKEQMPEKYWEIFSNAKKNGYAGYIEGKVSQEDFYRYIKPILSRLKGGDEFLAKIDRDDFLRKQRTFDNGSIPHQIHLKELHAILRRQEKYYPFLAEQKEKIEQLLCFRIPYYVGPLAKGGNSSFAWLKRRSDEPITPWNFKDVVDEEASAQAFIEGMTNYDTYLPEEKVLPKHSPLYEMFTVYNELTKVKYIAENMTKPLYLSAEQKEAIIDHLFKQTRKVTVKDLKEKYFSQIEGLENVDVTGVEGAFNASLGTYNDLLKIIKDKAFLDDEANAEILEEIVLILTLFQDEKLIEKRLAKYANLFEKSVLKKLRKRHYRGWGRLSRQLIDGMKDKASGKTILDFLKADDFANRNFIQLINDSSLDFEKLIDDAQKKAIKRESLTEAVANLAGSPAIKKGILQSLKVVDEIVKVMGHNPDNIVIEMSRENQTTAQGLKNARQRLKKIKEVHKKTGSRILEDNSERITNLTLQDNRLYLYLLQDGKDMYTGQDLDINNLSQYDIDHIIPQSFIKDNSIDNLVLTTQKANRGKSDNVPSIEVVRDMKDRVWRRQLANGAISRQKFDHLTKAERGGLADSDKARFLRRQLVETRQITKHVAQLLDSRFNSKSNQNKKLARNVKIITLKSKIVSDFRKDFGLYKLREVNNYHHAHDAYLNAVVGTALLKKYPKLEAEFVYGDYKHFDLVKLISKSDPSLGKATAKVFFYSNIMNFFKEELSLADGTLMKRPVIETNTETGEVVWDKVKDFKTIRKVLSYPQVNIVKKTEIQSGAFSKESVLSKGNSDKLIERKKGWDPKKYGGFDSPNTAYSIFVVAKVAKRKAQKLKTVKEIVGITIMEQAEYEKDNIAFLEKKGYQDIQEKLLIKLPKYSLFELENGRRRLLASANEFQKGNELALSGKYMKFLYLASRYDKLSSKIESEQQKKLFVEQHLHYFDEILDIVVKHATCYIKAENNLKKIISLYKKKEAYSINEQALNMLNLFIFTSLGAPSTFVFFDETIDRKRYTTSSDVLNGILIQQSITGLYETRIDLSRFGGD

SEQ ID NO: 39 - protein, 1345 aa, Streptococcus mutans
MKKPYSIGLDIGTNSVGWAVVTDDYKVPAKKMKVLGNTDKSHIKKNLLGALLFDSGNTAEDRRLKRTARRRYTRRRNRILYLQEIFSEEMGKVDDSFFHRLEDSFLVTEDKRGERHPIFGNLEEEVKYHENFPTIYHLRQYLADNPEKVDLRLVYLALAHIIKFRGHFLIEGKFDTRNNDVQRLFQEFLAVYDNTFENSSLQEQNVQVEEILTDKISKSAKKDRVLKLFPNEKSNGRFAEFLKLIVGNQADFKKHFELEEKAPLQFSKDTYEEELEVLLAQIGDNYAELFLSAKKLYDSILLSGILTVTDVSTKAPLSASMIQRYNEHQMDLAQLKQFIRQKLSDKYNEVFSDVSKDGYAGYIDGKTNQEAFYKYLKGLLNKIEGSGYFLDKIEREDFLRKQRTFDNGSIPHQIHLQEMRAIIRRQAEFYPFLADNQDRIEKILTFRIPYYVGPLARGKSDFAWLSRKSADKITPWNFDEIVDKESSAEAFINRMTNYDLYLPNQKVLPKHSLLYEKFTVYNELTKVKYKTEQGKTAFFDANMKQEIFDGVFKVYRKVTKDKLMDFLEKEFDEFRIVDLTGLDKENKVFNASYGTYHDLCKILDKDFLDNSKNEKILEDIVLTLTLFEDREMIRKRLENYSDLLTKEQVKKLERRHYTGWGRLSAELIHGIRNKESRKTILDYLIDDGNSNRNFMQLINDDALSFKEEIAKAQVIGETDNLNQVVSDIAGSPAIKKGILQSLKIVDELVKIMGHQPENIVVEMARENQFTKQGRRNSQQRLKGLTDSIKEFGSQILKEHPVENSQLQNDRLFLYYLQNGRDMYTGEELDIDYLSQYDIDHIIPQAFIKDNSIDNRVLTSSKENRGKSDDVPSKDVVRKMKSYWSKLLSAKLITQRKFDNLTKAERGGLTDDDKAGFIKRQLVETRQITKHVARILDERFYTETDENNKKIRQVKIVTLKSNLVSNFRKEFELYKVREINDYHHAHDAYLNAVIGKALLGVYPQLEPEFVYGDYPHFHGHKENKATAKKFFYSNIMNFFKKDDVRTDKNGEIIWKKDEHISNIKKVLSYPQVNIVKKVEEQTGGFSKESILPKGNSDKLIPRKTKKFYWDTKKYGGFDSPIVAYSILVIADIEKGKSKKLKTVKALVGVTIMEKMTFERDPVAFLERKGYRNVQEENIIKLPKYSLFKLENGRKRLLASARELQKGNEIVLPNHLGTLLYHAKNIHKVDEPKHLDYVDKHKDEFKELLDVVSNFSKKYTLAEGNLEKIKELYAQNNGEDLKELASSFINLLTFTAIGAPATFKFFDKNIDRKRYTSTTEILNATLIHQSITGLYETRIDLSKLGGD

SEQ ID NO: 40 - protein, 1229 aa, Streptococcus mutans
MKKPYSIGLDIGTNSVGWAVVTDDYKVPAKKMKVLGNTDKSHIEKNLLGALLFDSGNTAEDRRLKRTARRRYTRRRNRILYLQEIFSEEMGKVDDSFFHRLEDSFLVTEDKRGERHPIFGNLEEEVKYHENFPTIYHLRQYLADNPEKVDLRLVYLALAHIIKFRGHFLIEGKFDTRNNDVQRLFQEFLAVYDNTFENSSLQEQNIQVEEILTDKISKSAKKDRVLKLFPNEKSNGRFAEFLKLIVGNQADFKKHFELEEKAPLQFSKDTYEEELEVLLAQIGDNYAELFLSAKKLYDSILLSGILTVTDVGTKAPLSASMIQRYNEHQMDLTQLKQFIRQKLSDKYNEVFSDVSKDGYAGYIDGKTNQEAFYKYLKGLLNKIEGSGYFLDKIEREDFLRKQRTFDNGSIPHQIHLQEMRAIIRRQAEFYPFLADNQDRIEKILTFRIPYYVGPLARGKSDFAWLSRKSADKITPWNFDEIVDKESSAEAFINRMTNYDLYLPNQKVLPKHSLLYEKFTVYNELTKVKYKTEQGKTAFFDANMKQEIFDGVFKVYRKVTKDKLMDFLEKEFDEFRIVDLTGLDKENKVFNASYGTYHDLCKILDKDFLDNSKNEKILEDIVLTLTLFEDREMIRKRLENYSDLLTKEQVKKLERRHYTGWGRLSAELIHGIRNKESRKTILDYLIDDGNSNRNFMQLINDDALSFKEEIAKAQVIGETDNLNQVVSDIAGSPAIKKGILQSLKIVDELVKIMGHQPENIVVEMARENQFTNQGRRNSQQRLKGLTDSIKEFGSQILKEHPVENSQLQNDRLFLYYLQNGRDMYTGEELDIDYLSQYDIDHIIPQAFIKDNSIDNRVLTSSKENRGKSDDVPSKDVVRKMKPYWSKLLSAKLITQRKFDNLTKAERGGLTDDDKAGFIKRQLVETRQITKHVARILDERFNTETDENNKKIRQVKIVTLKSNLVSNFRKEFELYKVREINDYHHAHDAYLNAVIGKALLGVYPQLEPEFVYGDYPHFHGHEENKATAKKFFYSNIMNFFKKDDVRTDKNGEIIWKKDEHISNIKKVLSYPQVNIVKKVEEQTIGQNGGLFDDNPKSPLEVIPSKLVPLKKALNPEKYGGYQKPTTAYPILLIVDTKQLIPISVMDKKRFEQNPVKFLKDKGYQQIEKNNFVKLPKYTLVDIGNGIKRLWASSKEVHKGNQLVVSKKSQDLLYHAHHLDNDYSNEYVKNHY

SEQ ID NO: 41 - protein, 1368 aa, Streptococcus pyogenes; identical to SEQ ID NO: 31

SEQ ID NO: 42 - protein, 1345 aa, Streptococcus mutans
MKKPYSIGLDIGTNSVGWAVVTDDYKVPAKKMKVLGNTDKSHIKKNLLGALLFDSGNTAEDRRLKRTARRRYTRRRNRILYLQEIFSEEMGKVDDSFFHRLDESFLTDDDKNFDSHPIFGNKAEEDAYHQKFPTIYHLRKHLADSTEKADLRLVYLALAHMIKFRGHFLIEGELNAENTDVQKLFADFVGVYDRTFDDSHLSEITVDASSILTEKISKSRRLEKLINNYPKEKKNTLFGNLIALSLGLQPNFKTNFKLSEDAKLQFSKDTYEEELEVLLAQIGDNYAELFLSAKKLYDSILLSGILTVTDVSTKAPLSASMIQRYNEHQMDLAQLKQFIRQKLSDKYNEVFSDVSKDGYAGYIDGKTNQEAFYKYLKGLLNKIEGSGYFLDKIEREDFLRKQRTFDNGSIPHQIHLQEMRAIIRRQAEFYPFLADNQDRIEKILTFRIPYYVGPLARGKSDFAWLSRKSADKITPWNFDEIVDKESSVEAFINRMTNYDLYLPNQKVLPKHSLLYEKFTVYNELTKVKYKTEQGKTAFFDANMKQEIFDGVFKVYRKVTKDKLMDFLEKEFDEFRIVDLTGLDKENKAFNASYGTYHDLRKILDKDFLDNSKNEKILEDIVLTLTLFEDREMIRKRLKNYSDLLTKEQLKKLERRHYTGWGRLSAELIHGIRNKESRKTILDYLIDDGNSNRNFMQLINDDALSFKEEIAKAQVIGETDNLNQVVSDIAGSPAIKKGILQSLKIVDELVKIMGHQPENIVVEMARENQFTNQGRRNSQQRLKGLTDSIKEFGSQILKEHPVENSQLQNDRLFLYYLQNGRDMYTGEELDIDYLSQYDIDHIIPQAFIKDNSIDNRVLTSSKENRGKSDDVPSKDVVRKMKSYWSKLLSAKLITQRKFDNLTKGERGGLTDDDKAGFIKRQLVETRQITKHVARILDERFNTETDENNKKIRQVKIVTLKSNLVSNFRKEFELYKVREINDYHHAHDAYLNAVIGKALLGVYPQLEPEFVYGDYPHFHGHKENKATAKKFFYSNIMNFFKKDDVRTDKNGEIIWKKDEYISNIKKVLSYPQVNIVKKVEEQTGGFSKESILPKGDSDKLIPRKTKKFYWDTKKYGGFDSPIVAYSILVIADIEKGKSKKLKTVKALVGVTIMEKMTFERDPVAFLERKGYRNVQEENIIKLPKYSLFKLENGRKRLLASARELQKGNEIVLPNHLGTLLYHAKNIHKVDEPKHLDYVDKHKDEFKELLDVVSNFSKKYTLAEGNLEKIKELYAQNNGEDLKELASSFINLLTFTAIGAPATFKFFDKNIDRKRYTSTTEILNATLIHQSITGLYETRIDLSKLGGD

SEQ ID NO: 43 - protein, 1345 aa, Streptococcus mutans
MKKPYSIGLDIGTNSVGWAVVTDDYKVPAKKMKVLGNTDKSHIKKNLLGALLFDSGNTAEDRRLKRTARRRYTRRRNRILYLQEIFSEEMDKVDDSFFHRLEDSFLVTEDKRGERHPIFGNLEEEVKYHENFPTIYHLRQYLADNPEKVDLRLVYLALAHIIKFRGHFLIEGKFDTRNNDVQRLFQEFLAVYDNTFENSSLQEQNVQVEEILTDKISKSAKKDRVLKLFPNEKSNGRFAEFLKLIVGNQADFKKHFELEEKAPLQFSKDTYEEELEVLLAQIGDNYAELFLSAKKLYDSILLSGILTVTDVSTKAPLSASMIQRYNEHQMDLAQLKQFIRQKLSDKYNEVFSDVSKDGYAGYIDGKTNQEAFYKYLKGLLNKIEGSGYFLDKIEREDFLRKQRTFDNGSIPHQIHLQEMRAIIRRQAEFYPFLADNQDRIEKILTFRIPYYVGPLARGKSDFAWLSRKSADKITPWNFDEIVDKESSAEAFINRMTNYDLYLPNQKVLPKHSLLYEKFTVYNELTKVKYKTEQGKTAFFDANMKQEIFDGVFKVYRKVTKDKLMDFLEKEFDEFRIVDLTGLDKENKVFNASYGTYHDLCKILDKDFLDNSKNEKILEDIVLTLTLFEDREMIRKRLENYSDLLTKEQVKKLERRHYTGWGRLSAELIHGIRNKESRKTILDYLIDDGNSNRNFMQLINDDALSFKEEIAKAQVIGETDNLNQVVSDIAGSPAIKKGILQSLKIVDELVKIMGHQPENIVVEMARENQFTKQGRRNSQQRLKGLTDSIKEFGSQILKEHPVENSQLQNDRLFLYYLQNGRDMYTGEELDIDYLSQYDIDHIIPQAFIKDNSIDNRVLTSSKENRGKSDDVPSKDVVRKMKSYWSKLLSAKLITQRKFDNLTKAERGGLTDDDKAGFIKRQLVETRQITKHVARILDERFYTETDENNKKIRQVKIVTLKSNLVSNFRKEFELYKVREINDYHHAHDAYLNAVIGKALLGVYPQLEPEFVYGDYPHFHGHKENKATAKKFFYSNIMNFFKKDDVRTDKNGEIIWKKDEHISNIKKVLSYPQVNIVKKVEEQTGGFSKESILPKGNSDKLIPRKTKKFYWDTKKYGGFDSPIVAYSILVIADIEKGKSKKLKTVKALVGVTIMEKMTFERDPVAFLERKGYRNVQEENIIKLPKYSLFKLENGRKRLLASARELQKGNEIVLPNHLGTLLYHAKNIHKVDEPKHLDYVDKHKDEFKELLDVVSNFSKKYTLAEGNLEKIKELYAQNNGEDLKELASSFINLLTFTAIGAPATFKFFDKNIDRKRYTSTTEILNATLIHQSITGLYETRIDLSKLGGD

SEQ ID NO: 44 - protein, 1345 aa, Streptococcus mutans; identical to SEQ ID NO: 32

SEQ ID NO: 45 - protein, 1345 aa, Streptococcus mutans
MKKPYSIGLDIGTNSVGWAVVTDDYKVPAKKMKVLGNTDKSHIKKNLLGALLFDSGNTAEDRRLKRTARRRYTRRRNRILYLQEIFSEEMGKVDDSFFHRLEDSFLVTEDKRGERHPIFGNLEEEVKYHENFPTIYHLRQYLADNPEKTDLRLVYLALAHIIKFRGHFLIEGKFDTRNNDVQRLFQEFLAVYDNTFENSSLQEQNVQVEEILTDKISKSAKKDRVLKLFPNEKSNGRFAEFLKLIVGNQADFKKHFELEEKAPLQFSKDIYEEELEVLLAQIGDNYAELFLSAKKLYDSILLSGILTVTDVSTKAPLSASMIQRYNEHQMDLAQLKQFIRQKLSDKYNEVFSDVSKDGYAGYIDGKTNQEAFYKYLKGLLNKIEGSGYFLDKIEREDFLRKQRTFDNGSIPHQIHLQEMRAIIRRQAEFYPFLADNQDRIEKILTFRIPYYVGPLARGKSDFAWLSRKSADKITPWNFDEIVDKESSVEAFINRMTNYDLYLPNQKVLPKHSLLYEKFTVYNELTKVKYKTEQGKTAFFDANMKQEIFDGVFKVYRKVTKDKLMDFLEKEFDEFRIVDLTGLDKENKAFNASYGTYHDLRKILDKDFLDNSKNEKILEDIVLTLTLFEDREMIRKRLKNYSDLLTKEQLKKLERRHYTGWGRLSAELIHGIRNKESRKTILDYLIDDGNSNRNFMQLINDDALSFKEEIAKAQVIGETDNLNQVVSDIAGSPAIKKGILQSLKIVDELVKIMGHQPENIVVEMARENQFTNQGRRNSQQRLKGLTDSIKEFGSQILKEHPVENSQLQNDRLFLYYLQNGRDMYTGEELDIDYLSQYDIDHIIPQAFIKDNSIDNRVLTSSKENRGKSDDVPSKNVVRKMKSYWSKLLSAKLITQRKFDNLTKAERGGLTDDDKAGFIKRQLVETRQITKHVARILDERFHTETDENNKKIRQVKIVTLKSNLVSNFRKEFELYKVREINDYHHAHDAYLNAVIGKALLGVYPQLEPEFVYGDYPHFHGHKENKATAKKFFYSNIMNFFKKDDVRTDKNGEIIWKKDEHISNIKKVLSYPQVNIVKKVEEQTGGFSKESILPKGNSDKLIPRKTKKFYWDTKKYGGFDSPIVAYSILVIADIEKGKSKKLKTVKALVGVTIMEKMTFERDPVAFLERKGYRNVQEENIIKLPKYSLFKLENGRKRLLASARELQKGNEIVLPNHLGTLLYHAKNIHKVDEPKHLDYVDKHKDEFKELLDVVSNFSKKYTLAEGNLEKIKELYAQNNGEDLKELASSFINLLTFTAIGAPATFKFFDKNIDRKRYTSTTEILNATLIHQSITGLYETRIDLSKLGGD

SEQ ID NO: 46 - protein, 611 aa, Streptococcus dysgalactiae
KSRRLENLIAQLPGEKKNGLFGNLIALSLGLTPNFKSNFDLAEDAKLQLSKDTYDDDLDNLLAQIGDQYADLFLAAKNLSDATLLSDILRVNSEITKAPLSASMIKRYDEHHQDLTLLKALVRQQLPEKYKEIFFDQSKNGYAGYIDGGASQEEFYKFIKPILEKMDGTEELLAKLNREDLLRKQRTFDNGSIPHQIHLGELHAILRRQEDFYPFLKDNREKIEKILTFRIPYYVGPLARGNSRFAWMTRKSEETITPWNFEEVVDKGASAQSFIERMTNFDKNLPNEKVLPKHSLLYEYFTVYNELTKVKYVTEGMRKPAFLSGEQKKAIVDLLFKTNRKVTVKQLKEDYFKKIECFDSVEISGVEDRFNASLGTYHDLLKIIKDKDFLDNEENEDILEDIVLTLTLFEDKEMIEERLKTYAHLFDDKVMKQLKRRHYTGWGRLSRKLINGIRDKQSGKTILDFLKSDGFANRNFIQLIHDDSLTFKEAIQKAQVSGQGHSLHEQIANLAGSPAIKKGILQSVKVVDELVKVMGHKPENIVIEMARENQTTQKGQKNSRERMKRIEEGIKELGSQILKEHPVENTQLQNEKLYLYYLQNGRDMYVDQELD

SEQ ID NO: 47 - protein, 213 aa, Streptococcus dysgalactiae
MDKKYSIGLDIGTNSVGWAVITDDYKVPSKKFKVLGNTDRHSIKKNLIGALLFDSGETAEATRLKRTARRRYTRRKNRIRYLQEIFSSEMSKVDDSFFHRLEESFLVEEDKKHERHPIFGNIVDEVAYHEKYPTIYHLRKKLADSTDKADLRLIYLALAHMIKFRGHFLIEGDLNPDNSDVDKLFIQLVQTYNQLFEEKPINASGVDAKAILS

SEQ ID NO: 48 - protein, 1345 aa, Streptococcus mutans; identical to SEQ ID NO: 8

SEQ ID NO: 49 - protein, 1345 aa, Streptococcus mutans
MKKPYSIGLDIGTNSVGWAVVTDDYKVPAKKMKVLGNTDKSHIKKNLLGALLFDSGNTAEDRRLKRTARRRYTRRRNRILYLQEIFSEEMGKVDDSFFHRLEDSFLVTEDKRGERHPIFGNLEEEVKYHENFPTIYHLRQYLADNPEKVDLRLVYLALAHIIKFRGHFLIEGKFDTRNNDVQKLFQEFLAVYDNTFENSSLQEQNVQVEEILTDKISKSAKKDRVLKLFPNEKSNGRFAEFLKLIVGNQADFKKHFELEEKAPLQLSKDTYEEELEVLLAQIGDNYAELFLSAKKLYDSILLSGILTVTDVSTKAPLSASMIQRYNEHQMDLAQLKQFIRQKLSDKYNEVFSDVSKDGYAGYIDGKTNQEAFYKYLKGLLNKIEGSGYFLDKIEREDFLRKQRTFDNGSIPHQIHLQEMRAIIRRQAEFYPFLADNQDRIEKILTFRIPYYVGPLARGKSDFAWLSRKSADKITPWNFDEIVDKESSVEAFINRMTNYDLYLPNQKVLPKHSLLYEKFTVYNELTKVKYKTEQGKTAFFDANMKQEIFDGVFKVYRKVTKDKLMDFLEKEFDEFRIVDLTGLDKENKAFNASYGTYHDLRKILDKDFLDNSKNEKILEDIVLTLTLFEDREMIRKRLENYSDLLTKEQVKKLERRHYTGWGRLSAELIHGIRNKESRKTLLDYLIDDGNSNRNFMQLINDDALSFKEEIAKAQVIGETDNLNQVVSDIAGSPAIKKGILQSLKIVDELVKIMGHQPENIVVEMARENQFTNQGRRNSQQRLKGLTDSIKEFGSQILKEHPVENSQLQNDRLFLYYLQNGRDMYTGEELDIDYLSQYDIDHIIPQAFIKDNSIDNRVLTSSKENRGKSDDVPSKDVVRKMKSYWSKLLSAKLITQRKFDNLTKAERGGLTDDDKAGFIKRQLVETRQITKHVARILDERFNTETDENNKKIRQVKIVTLKSNLVSNFRKEFELYKVREINDYHHAHDAYLNAVIGKALLGVYPQLEPEFVYGDYPHFHGHKENKATAKKFFYSNIMNFFKKDDVRTDKNGEIIWKKDEYISNIKKVLSYPQVNIVKKVEEQTGGFSKESILPKGNSDKLIPRKTKKFYWDTKKYGGFDSPIVAYSILVIADIEKGKSKKLKTVKALVGVTIMEKMTFERDPIAFLERKGYRNVQEENIIKLPKYSLFKLENGRKRLLASARELQKGNEIVLPNHLGTLLYHAKNIHKVDEPKHLDYVDKHKDEFKELLDVVSNFSKKYTLAEGNLEKIKELYAQNNGEDLKELASSFINLLTFTAIGAPATFKFFDKNIDRKRYTSTTEILNATLIHQSITGLYETRIDLSKLGGD

SEQ ID NO: 50 - protein, 1350 aa, Streptococcus mutans
MKKPYSIGLDIGTNSVGWAVVTDDYKVPAKKMKVLGNTDKSHIEKNLLGALLFDSGNTAEDRRLKRTARRRYTRRRNRILYLQEIFSEEMGKVDDSFFHRLEDSFLVTEDKRGERHPIFGNLEEEVKYHENFPTIYHLRQYLADNPEKVDLRLVYLALAHIIKFRGHFLIEGKFDTRNNDVQRLFQEFLAVYDNTFENSSLQEQNVQVEEILTDKISKSAKKDRVLKLFPNEKSNGRFAEFLKLIVGNQADFKKHFELEEKAPLQFSKDTYEEELEVLLAQIGDNYAELFLSAKKLYDSILLSGILTVTDVSTKAPLSASMIQRYNEHQMDLTQLKQFIRQKLSDKYNEVFSDVSKDGYAGYIDGKTNQEAFYKYLKGLLNKIEGSGYFLDKIEREDFLRKQRTFDNGSIPHQIHLQEMRAIIRRQAEFYSFLADNQDRIEKILTFRIPYYVGPLARGKSDFAWLSRKSADKITPWNFDEIVDKESSAEAFINRMTNYDLYLPNQKVLPKHSLLYEKFTVYNELTKVKYKTEQGKTAFFDANMKQEIFDGVFKVYRKVTKDKLMDFLEKEFDEFRIVDLTGLDKENKAFNASYGTYHDLRKILDKDFLDNSKNEKILEDIVLTLTLFEDREMIRKRLENYSDLLTKEQVKKLERRHYTGWGRLSAELIHGIRNKESRKTILDYLIDDGNSNRNFMQLINDDALSFKEEIAKAQVIGETDNLNQVVSDIAGSPAIKKGILQSLKIVDELVKIMGHQPENIVVEMARENQFTNQGRRNSQQRLKGLTDSIKEFGSQILKEHPVENSQLQNDRLFLYYLQNGRDMYTGEELDIDYLSQYDIDHIIPQAFIKDNSIDNRVLTSSKENRGKSDDVPSEDVVNRMRPFWNKLLSSGLISQRKYNNLTKKELTLDDKAGFIKRQLVETRQITKHVARMLDERFNKEFDDNNKRIRKVKIVTLKSNLVSSFRKEFELYKVREINDYHHAHDAYLNAVVVKALLVKYSKLEPEFVYGEYPKYNSYRERKTATQKMFFYSNIMNMFKSKVKLADDQIVERPMIEVNDETGEIAWDKTKHITTVKKVLSYPQVNIVKKVEEQTIGQNGGLFDDNPKSPLEVIPSKLVPLKKALNPEKYGGYQKPTTAYPILLIVDTKQLIPISVMDKKRFEQNPVKFLKDKGYQQIEKNNFVKLPKYTLVDIGNGIKRLWASSKEVHKGNQLVVSKKSQDLLYHAHHLDNDYSNEYVKNHYQQFDILFNEITSFSKKCKLGKEHIQKIEEAYSKERDSASIEELADGFIKLLGFTQLGATSPFSFLGIKLNQKQYTGKKDYLLPCMEATLIHQSITGLYETRIDLSKLGGD

SEQ ID NO: 51 - protein, 1345 aa, Streptococcus mutans
MKKPYSIGLDIGTNSVGWAVVTDDYKVPAKKMKVLGNTDKSHIKKNLLGALLFDSGNTAADRRLKRTARRRYTRRRNRILYLQEIFAEEMSKVDDSFFHRLEDSFLVTEDKRGERHPIFGNLEEEVKYHENFPTIYHLRQYLADNPEKVDLRLVYLALAHIIKFRGHFLIEGKFDTRNNDVQRLFQEFLAVYDNTFENSSLQEQNVQVEEILTDKISKSAKKDRVLKLFPNEKSNGRFAEFLKLIVGNQADFKKHFELEEKAPLQFSKDTYEEELEVLLTQIGDNYAELFLSAKKLYDSILLSGILTVTDVSTKAPLSASMIQRYNEHQMDLAQLKQFIRQKLSDKYNEVFSDVSKDGYAGYIDGKTNQEAFYKYLKGLLNKIEGSGYFLDKIEREDFLRKQRTFDNGSIPHQIHLQEMRAIIRRQAEFYPFLADNQDRIEKILTFRIPYYVGPLARGKSDFAWLSRKSADKITPWNFDEIVDKESSAEAFINRMTNYDLYLPNQKVLPKHSLLYEKFTVYNELTKVKYKTEQGKTAFFDANMKQEIFDGVFKVYRKVTKDKLMDFLEKEFDEFRIVDLTGLDKENKAFNASYGTYHDLRKILDKDFLDNSKNEKILEDIVLTLTLFEDREMIRKRLENYSDLLTKEQVKKLERRHYTGWGRLSAELIHGIRNKESRKTLLDYLIDDGNSNRNFMQLINDDALSFKEEIAKAQVIGETDNLNQVVSDIAGSPAIKKGILQSLKIVDELVKIMGHQPENIVVEMARENQFTNQGRRNSQQRLKGLTDSIKEFGSQILKEHPVENSQLQNDRLFLYYLQNGRDMYTGEELDIDYLSQYDIDHIIPQAFIKDNSIDNRVLTSSKENRGKSDDVPSKDVVRKMKPYWSKLLSAKLITQRKFDNLTKAERGGLTDDDKAGFIKRQLVETRQITKHVARILDERFNTETDENNKKIRQVKIVTLKSNLVSNFRKEFELYKVREINDYHHAHDAYLNAVIGKALLGVYPQLEPEFVYGDYPHFHGHEENKATAKKFFYSNIMNFFKKDDVRTDKNGEIIWKKDEHISNIKKVLSYPQVNIVKKVEEQTGGFSKESILPKGNSDKLIPRKTKKFYWDTKKYGGFDSPIVAYSILVIADIEKGKSKKLKTVKALVGVTIMEKMTFERDPVAFLERKGYRNVQEENIIKLPKYSLFKLENGRKRLLASARELQKGNEIVLPNHLGTLLYHAKNIHKVDEPKHLDYVDKHKDEFKELLDVVSNFSKKYTLAEGNLEKIKELYAQNNGEDLKELSSSFINLLTFTAIGAPAAFKFFDKNIDRKRYTSTTEILNATLIHQSITGLYETRIDLSKLGGD

SEQ ID NO: 52 - protein, 1381 aa, Streptococcus suis
MVKKKYAIGIDIGTNSVGWSIVTDDYKVPSKKMKVFGNTEKRYIKKNLLGTLLFDEGNTAENRRLKRTARRRYTRRRNRILYLQEIFAEEINKIDDSFFQRLDDSFLIVEDKQGSKHPIFGTLQEEKEYHKQFPTIYHLRKQLADSSQKADIRLIYLALAHIIKYRGHFLFEGDLKSENKDVQHLFNDFVEMFDKTVEGSYLSENLPNVADVLVEKVSKSRRLENILHYFPNEKKNGLFGNFLALALGLQPNFKTNFELAEDAKIQFSKETYEEDLEELLGKIGDDYADLFIATKSLYDGILLAGILSTTDSTTKAPLSSSMVNRYEEHQKDLALLKNFIHQNLSDSYKEVFNDKLKDGYAGYIEGKTTQENFYRFIKKAIEKIEGSNYFIDKIDREDFLRKQRTFDNGSIPHQIHLQEMHAIIRRQAEFYPFLVENQDKIEKILTFRIPYYVGPLARGKSEFAWLNRKSDEKIRPWNFDEMVDKETSAENFITRMTNYDRYLPDQKVLPKHSLLYEKFAVYNELTKVKFIAEGMRDYQFLDSGQKKDIVKTLFKTKRKVTAKDIKAYLENSNGYAGVELKGLEEQFNASLPTYHDLLKILRDKAFIDAEENQEILEDIVLTLTLFEDREMIRKRLEKYKDILTEEQRKKLERRHYTGWGRLSAKLINGILDKVTRKTILGYLIDDGTSNRNFMQLINDDTLSFVDEIRLAQGSGEAEDYRAEVQNLAGSPAIKKGILQSLKIVDELIEVMGYEPEHIVVEMARENQFTNQGRRNSQQRINRLENALKDFGSKILEEQKPYGVSKVNNIHLQSDRLFLYYLQNGKDMYTDEELDIDHLSEYDIDHIIPQAFIKDDSLDNKVLTKSAKNRGKSDDVPSMEIVHNRKNFWRQLLKSKLISQRKFDNLTKAERGGLTNEDKARFIQRQLVETRQITKHVARMLDTRFNTKLDEAGNRIRDPKVNIITLKSNLVSQFRKDYQLYKIREINNYHHAHDAYINAVVATALLKKYPQLAPEFVYGEYPTYNSYNSRKSATEKVLFYSNIMNFFKRIVVHSKTGEVRIRPVIEVNKETGEIVWDKKSDFRTVRKVLSYPQVNVVKKTEVQNHGLDRGKPKGFYNANLSPRPKEGSVENLVPAKQSFDTKRYGGYAGISNSYAVLVNGIIEKGKKKSKAEVTEFQGISILARKDFDKNPKQYLLNLGYKDIKSIIKLPKYSLFELENGSRRMLASILSTNNKRGEIHKGNEMYLPDKFVTLLYHAMRVNRTLEPGHKKYVETHRHVFDELLIYILEYNEKIVGAKANGKRIVEAYSARKDTDNLEELCNSFINLLNLTALGSAVDFEFLGTKIPRYRDYTPSSLLKATLIHQSVTGLYETRIDLSKLGGD

SEQ ID NO: 53 - protein, 1345 aa, Streptococcus mutans; identical to SEQ ID NO: 30

SEQ ID NO: 54 - protein, 1345 aa, Streptococcus mutans; identical to SEQ ID NO: 39

SEQ ID NO: 55 - protein, 1345 aa, Streptococcus mutans; identical to SEQ ID NO: 30

SEQ ID NO: 56 - protein, 1368 aa, Streptococcus iniae
MRKPYSIGLDIGTNSVGWAVITDDYKVPSKKMRIQGTTDRTSIKKNLIGALLFDNGETAEATRLKRTTRRRYTRRKYRIKELQKIFSSEMNELDIAFFPRLSESFLVSDDKEFENHPIFGNLKDEITYHNDYPTIYHLRQTLADSDQKADLRLIYLALAHIIKFRGHFLIEGNLDSENTDVHVLFLNLVNIYNNLFEEDIVETASIDAEKILTSKTSKSRRLENLIAEIPNQKRNMLFGNLVSLALGLTPNFKTNFELLEDAKLQISKDSYEEDLDNLLAQIGDQYADLFIAAKKLSDAILLSDIITVKGASTKAPLSASMVQRYEEHQQDLALLKNLVKKQIPEKYKEIFDNKEKNGYAGYIDGKTSQEEFYKYIKPILLKLDGTEKLISKLEREDFLRKQRTFDNGSIPHQIHLNELKAIIRRQEKFYPFLKENQKKIEKLFTFKIPYYVGPLANGQSSFAWLKRQSNESITPWNFEEVVDQEASARAFIERMTNFDTYLPEEKVLPKHSPLYEMFMVYNELTKVKYQTEGMKRPVFLSSEDKEEIVNLLFKKERKVTVKQLKEEYFSKMKCFHTVTILGVEDRFNASLGTYHDLLKIFKDKAFLDDEANQDILEEIVWTLTLFEDQAMIERRLVKYADVFEKSVLKKLKKRHYTGWGRLSQKLINGIKDKQTGKTILGFLKDDGVANRNFMQLINDSSLDFAKIIKNEQEKTIKNESLEETIANLAGSPAIKKGILQSIKIVDEIVKIMGQNPDNIVIEMARENQSTMQGIKNSRQRLRKLEEVHKNTGSKILKEYNVSNTQLQSDRLYLYLLQDGKDMYTGKELDYDNLSQYDIDHIIPQSFIKDNSIDNTVLTTQASNRGKSDNVPNIETVNKMKSFWYKQLKSGAISQRKFDHLTKAERGALSDFDKAGFIKRQLVETRQITKHVAQILDSRFNSNLTEDSKSNRNVKIITLKSKMVSDFRKDFGFYKLREVNDYHHAQDAYLNAVVGTALLKKYPKLEAEFVYGDYKHYDLAKLMIQPDSSLGKATTRMFFYSNLMNFFKKEIKLADDTIFTRPQIEVNTETGEIVWDKVKDMQTIRKVMSYPQVNIVMKTEVQTGGFSKESIWPKGDSDKLIARKKSWDPKKYGGFDSPIIAYSVLVVAKIAKGKTQKLKTIKELVGIKIMEQDEFEKDPIAFLEKKGYQDIQTSSIIKLPKYSLFELENGRKRLLASAKELQKGNELALPNKYVKFLYLASHYTKFTGKEEDREKKRSYVESHLYYFDEIMQIIVEYSNRYILADSNLIKIQNLYKEKDNFSIEEQAINMLNLFTFTDLGAPSAFKFFNGDIDRKRYSSTNEIINSTLIYQSPTGLYETRIDLSKLGGK

SEQ ID NO: 57 - protein, 1345 aa, Streptococcus constellatus
MGKPYSIGLDIGTNSVGWAVVTDDYKVPAKKMKVLGNTDKQSIKKNLLGALLFDSGETAEATRLKRTARRRYTRRKNRLRYLQEIFTGEMNKVDENFFQRLDDSFLVDEDKRGEHHPIFGNIAAEVKYHDDFPTIYHLRRHLADTSKKADLRLVYLALAHMIKFRGHFLYEGDLKAENTDVQALFKDFVEEYDKTIEESHLSEITVDALSILTEKVSKSSRLENLIAHYPTEKKNTLFGNLIALSLDLHPNFKTNFQLSEDAKLQFSKDTYEEDLEGFLGEVGDEYADLFASAKNLYDAILLSGILTVDDNSTKAPLSASMVKRYEEHQKDLKKLKDFIKVNAPDQYNAIFKDKNKKGYASYIESGVKQDEFYKYLKGILLKINGSGDFLDKIDREDFLRKQRTFDNGSIPHQIHLQEMHAILRRQGEHYPFLKENQDKIEKILTFRIPYYVGPLARKGSRFAWAEYKADEKITPWNFDDILDKEKSAEKFITRMTLNDLYLPEEKVLPKHSPLYEAFTVYNELTKVKYVNEQGEAKFFDTNMKQEIFDHVFKENRKVTKDKLLNYLNKEFEEFRIVNLTGLDKENKAFNSSLGTYHDLRKILDKSFLDDKANEKTIEDIIQTLTLFEDREMIRQRLQKYSDIFTKAQLKKLERRHYTGWGRLSYKLINGIRNKENKKTILDYLIDDGYANRNFMQLINDDALSFKEEIARAQIIDDVDDIANVVHDLPGSPAIKKGILQSVKIVDELVKVMGHNPANIIIEMARENQTTDKGRRNSQQRLKLLQDSLKNLDNPVNIKNVENQQLQNDRLFLYYIQNGKDMYTGETLDINNLSQYDIDHIIPQAFIKDNSLDNRVLTRSDKNRGKSDDVPSIEVVHEMKSFWSKLLSVKLITQRKFDNLTKAERGGLTEEDKAGFIKRQLVETRQITKHVAQILDERFNTEFDGNKRRIRNVKIITLKSNLVSNFRKEFELYKVREINDYHHAHDAYLNAVVGNALLLKYPQLEPEFVYGEYPKYNSYRSRKSATEKFLFYSNILRFFKKEDIQTNEDGEIAWNKEKHIKILRKVLSYPQVNIVKKTEEQTGGFSKESILPKGESDKLIPRKTKNSYWDPKKYGGFDSPVVAYSILVFADVEKGKSKKLRKVQDMVGITIMEKKRFEKNPVDFLEQRGYRNVRLEKIIKLPKYSLFELENKRRRLLASAKELQKGNELVIPQRFTTLLYHSYRIEKDYEPEHREYVEKHKDEFKELLEYISVFSRKYVLADNNLTKIEMLFSKNKDAEVSSLAKSFISLLTFTAFGAPAAFNFFGENIDRKRYTSVTECLNATLIHQSITGLYETRIDLSKLGED

SEQ ID NO: 58 - protein, 1370 aa, Streptococcus agalactiae; identical to SEQ ID NO: 5

SEQ ID NO: 59 - protein, 1345 aa, Streptococcus mutans; identical to SEQ ID NO: 30

SEQ ID NO: 60 - protein, 1345 aa, Streptococcus mutans; identical to SEQ ID NO: 42

SEQ ID NO: 61 - protein, 1388 aa, Streptococcus thermophilus
MTKPYSIGLDIGTNSVGWAVITDNYKVPSKKMKVLGNTSKKYIKKNLLGVLLFDSGITAEGRRLKRTARRRYTRRRNRILYLQEIFSTEMATLDDAFFQRLDDSFLVPDDKRDSKYPIFGNLVEEKAYHDEFPTIYHLRKYLADSTKKADLRLVYLALAHMIKYRGHFLIEGEFNSKNNDIQKNFQDFLDTYNAIFESDLSLENSKQLEEIVKDKISKLEKKDRILKLFPGEKNSGIFSEFLKLIVGNQADFRKCFNLDEKASLHFSKESYDEDLETLLGYIGDDYSDVFLKAKKLYDAILLSGFLTVTDNETEAPLSSAMIKRYNEHKEDLALLKEYIRNISLKTYNEVFKDDTKNGYAGYIDGKTNQEDFYVYLKNLLAEFEGADYFLEKIDREDFLRKQRTFDNGSIPYQIHLQEMRAILDKQAKFYPFLAKNKERIEKILTFRIPYYVGPLARGNSDFAWSIRKRNEKITPWNFEDVIDKESSAEAFINRMTSFDLYLPEEKVLPKHSLLYETFNVYNELTKVRFIAESMRDYQFLDSKQKKDIVRLYFKDKRKVTDKDIIEYLHAIYGYDGIELKGIEKQFNSSLSTYHDLLNIINDKEFLDDSSNEAIIEEIIHTLTIFEDREMIKQRLSKFENIFDKSVLKKLSRRHYTGWGKLSAKLINGIRDEKSGNTILDYLIDDGISNRNFMQLIHDDALSFKKKIQKAQIIGDEDKGNIKEVVKSLPGSPAIKKGILQSIKIVDELVKVMGGRKPESIVVEMARENQYTNQGKSNSQQRLKRLEKSLKELGSKILKENIPAKLSKIDNNALQNDRLYLYYLQNGKDMYTGDDLDIDRLSNYDIDHIIPQAFLKDNSIDNKVLVSSASNRGKSDDFPSLEVVKKRKTFWYQLLKSKLISQRKFDNLTKAERGGLLPEDKAGFIQRQLVETRQITKHVARLLDEKFNNKKDENNRAVRTVKIITLKSTLVSQFRKDFELYKVREINDFHHAHDAYLNAVIASALLKKYPKLEPEFVYGDYPKYNSFRERKSATEKVYFYSNIMNIFKKSISLADGRVIERPLIEVNEETGESVWNKESDLATVRRVLSYPQVNVVKKVEEQNHGLDRGKPKGLFNANLSSKPKPNSNENLVGAKEYLDPKKYGGYAGISNSFAVLVKGTIEKGAKKKITNVLEFQGISILDRINYRKDKLNFLLEKGYKDIELIIELPKYSLFELSDGSRRMLASILSTNNKRGEIHKGNQIFLSQKFVKLLYHAKRISNTINENHRKYVENHKKEFEELFYYILEFNENYVGAKKNGKLLNSAFQSWQNHSIDELCSSFIGPTGSERKGLFELTSRGSAADFEFLGVKIPRYRDYTPSSLLKDATLIHQSVTGLYETRIDLAKLGEG

SEQ ID NO: 62 - protein, 1370 aa, Streptococcus sanguinis
MKKPYSIGLDIGTNSVGWAVVTDDYKVPAKKMRVFGDTDRSHIKKNLLGTLLFDDGNTAESRRLKRTARRRYTRRRNRILYLQEIFTESMNEIDESFFHRLDDSFLVPEDKRGSKYPIFATLQEEKEYHKQFPTIYHLRKQLADSKEKSDVRLIYLALAHMIKYRGHFLYEETFDIKNNDIQKIFNEFINIYDNTFEGSSLSGQNAQVEAIFTDKISKSAKRERVLKLFPDEKSTGLFSEFLKLIVGNQADFKKHFDLEEKAPLQFSKDTYDEELENLLGQIGDDFADLFLIAKKLYDAILLSGILTVTDPSTKAPLSASMIERYENHQKDLAALKQFIKNNLPEKYVEVFSDQSKDGYAGYIDGKTTQEAFYKYIKNLLSKFEGADYFLDKIEREDFLRKQRTFDNGSIPHQIHLQEMNAILRRQGEHYPFLKENREKIEKILTFRIPYYVGPLARDNRDFSWLTRNSDEPIRPWNFEEVVDKARSAEDFIHRMTNYDLYLPEEKVLPKHSLLYETFAVYNELTKVKFIAEGLRDYQFLDSGQKKQIVNQLFKEKRKVTEKDIIHYLHNVDGYDGIELKGIEKQFNANLSTYHDLLKITKDKEFMDDPKNEEILENIVHTLTIFEDREMIKQRLAQYDTLFDEKVIKALTRRHYTGWGKLSAKLINGIRDKQSGKTILDYLIDDDKINRNFMQLINDDGLSFKEIIQKAQVVGKTDDVKQVVQELPGSPAIKKGILQSIKIVDELVKVMGYALESIVIEMARENQTTARGKKNSQQRYKRIEDALKNLAPGLDSNILKENPTDNIQLKNDRLFLYYLQNGKDMYTGKPLDINQLSSYDIDHIIPQAFIKDDSIDNRVLTSSKDNRGKSDNVPSLEVVQKRKAFWQQLLDSKLISERKFNNLTKAERGGLDERDKVGFIRRQLVETQQITKNVAQILDARFNTEVKEKNQKIRTVKIITLKSNLVSNFRKEFGLYKVREINNYHHAHDAYLNAVVAKAILKKYPKLEPEFVYGDYQKYDLKKYISRFKPSKEIEKATEKYFFYSNLLNFFKEEVLYADGTIRKRENIEYSKDTGEIAWDKEKDFATIKKVLSYPQVNIVKKREVQTGGFSKESILPKGNSDKLIPRKTKDILWDTTKYGGFDSPVIAYSILLIADIEKGKAKKLKTVKTLVGITIMEKAAFEENPITFLENKGYHNVRKENILCLPKYSLFELENGRRRLLASAKELQKGNEIVLPVCLTTLLYHSKNLHKLDEPEHLEYIQKHRNEFKDLLNLVSEFSQKYILAEANLEKIKDLYADNEQADIEILANSFINLLTFTALGAPAAFKFFGKDVDRKRYTTVSEILNATLIHQSITGLYETRIDLSKLGEE

SEQ ID NO: 63 - protein, 1155 aa, Streptococcus dysgalactiae
MDKKYSIGLDIGTNSVGWAVITDDYKVPSKKFKVLGNTDRHSIKKNLIGALLFDSGETAEATRLKRSARRRYTRRKNRIRYLQEIFSSEMSKVDDSFFHRLEESFLVEEDKKHERHPIFGNIVDEVAYHEKYPTIYHLRKKLADSTDKADLRLIYLALAHMIKFRGHFLIEGDLNPDNSDMDKLFIQLVQTYNQLFEENPINASRVDAKAILSARLSKSRRLENLIAQLPGEKRNGLFGNLIALSLGLTPNFKSNFDLAEDAKLQLSKDTYDDDLDNLLAQIGDQYADLFLAAKNLSDAILLSDILRVNSEITKAPLSASMIKRYDEHHQDLTLLKALVRQQLPEKYKEIFFDQSKNGYAGYIDGGASQEEFYKFIKPILEKMDGTEELLAKLNREDLLRKQRTFDNGSIPHQIHLGELHAILRRQEDFYPFLKDNREKIEKILTFRIPYYVGPLARGNSRFAWMTRKSEETITPWNFEEVVDKGASAQSFIERMTNFDKNLPNEKVLPKHSLLYEYFTVYNELTKVKYVTEGMRKPEFLSGKQKEAIVDLLFKTNRKVTVKQLKEDYFKKIECFDSVEISGVEDRFNASLGTYHDLLKIIKDKDFLDNEENEDILEDIVLTLTLFEDKEMIEERLKTYAHLFDDKVMKQLKRRHYTGWGRLSRKLINGIRDKQSGKTILDFLKSDGFANRNFIQLIHDDSLTFKEAIQKAQVSGQGHSLHEQIANLAGSPAIKKGILQSVKVVDELVKVMGHKPENIVIEMARENQTTQKGQKNSRERMKRIEEGIKELGSQILKEHPVENTQLQNEKLYLYYLQNRRDMYVDQELDINRLSDYDVDHIVPQSFIKDDSIDNKVLTRSDKNRGKSDDVPSEEVVKKMKNYWRQLLNAKLITQRKFDNLTKAERGGLSELDKAGFIKRQLVETRQITKHVAQILDSRMNTKYDENDKLIREVKVITLKSKLVSDFRKDFQFYKVREINNYHHAHDAYLNAVVGTALIKKYPKLESEFVYGDYKVYDVRKMIAKSEQEIGKATAKRFFYSNIMNFFKTEITLANGEIRKRPLIETNEETGEIVWDKGRDFATVRKVLSMPQVNIVKKTEVQTGALTNESIYARGSFDKLISRKHRFESSKYGGFGSPTVTYSVLVVAKYQSYKMEK

SEQ ID NO: 64 - protein, 153 aa, Streptococcus dysgalactiae
MANNNSRGDLQKANEMFLPAKLVTLLYHAHKIESSKELEHEAYILDHYNDLYQLLSYIERFASLYVDVEKNISKVKELFSNIESYSISEICSSVINLLTLTASGAPADFKFLGTTIPRKRYGSPQSILSSTLIHQSITGLYETRIDLSQLGGD

SEQ ID NO: 65 - protein, 1345 aa, Streptococcus mutans; identical to SEQ ID NO: 30

SEQ ID NO: 66 - protein, 1370 aa, Streptococcus agalactiae
MNKPYSIGLDIGTNSVGWSIITDDYKVPAKKMRVLGNTDKEYIKKNLIGALLFDGGNTAADRRLKRTARRRYTRRRNRILYLQEIFAEEMSKVDDSFFHRLEDSFLVEEDKRGSKYPIFATMQEEKDYHEKFPTIYHLRKELADKKEKADLRLVYLALAHIIKFRGHFLIEDDRFDVRNTDIQKQYQAFLEIFDTSFENNHLLSQNVDVEAILTDKISKSAKKDRILAQYPNQKSTGIFAEFLKLIVGNQADFKKHFNLEDKTPLQFAKDSYDEDLENLLGQIGDEFADLFSAAKKLYDSVLLSGILTVTDLSTKAPLSASMIQRYDEHREDLKQLKQFVKASLPEKYQEIFADSSKDGYAGYIEGKTNQEAFYKYLSKLLTKQEDSEYFLEKIKNEDFLRKQRTFDNGSIPHQVHLTELKAIIRRQSEYYPFLKENQDKIEKILTFRIPYYVGPLARGNSDFAWMTRKTDDSIRPWNFEDLVDKEKSAEAFIHRMTNNDLYLPEEKVLPKHSLIYEKFTVYNELTKVRYKNEQGETYFFDSNVKQEIFDGVFKEHRKVSKKQLLDFLAKEFEEFRIVDVTGLDKENKAFNASLGTYHDLKKILDKDFLDNPDNESILEDIVQTITLFEDREMIKKRLENYKDLFTESQLKKLYRRHYTGWGRLSAKLINGIRDRESQKTILDYLISDGRANRNFMQLINDDGLSFKSIISKAQSGSHSDNLKEVVGELAGSPAIKKGILQSLKIVDELVKVMGYEPEQIVVEMARENQTTNQGRRNSRQRYKLLEDGVKNLASDLNGDILKEYPTDNQALQNERLFLYYLQNGRDMYTGEALDIDNLSQYDIDHIVPQAFIKDDSIDNRVLVSSAKNRGKSDDVPSIDIVKARKAFWKKLLDAKLISQRKYDNLTKAERGGLTPDDKAGFIQRQLVETRQITKHVARILDERFNNKVDDNNKPIRKVKIVTLKSNLVSNFRKEFGFYKIREVNNYHHAHDAYLNAVVAKAILTKYPQLEPEFVYGDYPKYNSYKTRKSATEKLFFYSNIMNFFKTKVTLADETVVVKDDIEVNNETGEIAWDKKKHFATVRKVLSYPQVNIVKKTEVQTGGFSKESILAHSNSDKLIPRKTKDIYLDPKKYGGFDSPIVAYSVLVLADIKKGKAQKLKTVKELIGITIMERERFEKNPSAFLESKGYLNIRTDKLIILPKYSLFELENGRRRLLASAGELQKGNELALPTQYMKFLYLASRYNESKGKPEEIEKKQEFVNQHVSYFDDILQLINDFSKRVILADANLEKINKLYSDNKDNTPVDELAKNIINLFTFTSLGAPAAFKFFDKSVDRKRYTSTKEVLDSTLIHQSITGLYETRIDLGKLGED

SEQ ID NO: 67 - protein, 1392 aa, Streptococcus mitis
MNNNNYSIGLDIGTNSVGWAVITDDYKVPSKKMKVLGNTDKHFIKKNLIGALLFDEGATAEDRRFKRTARRRYTRRKNRLRYLQEIFSEEMSKVDSSFFHRLDDSFLVPEDKRGSKYPIFATLAEEKEYHKKFPTIYHLRKHLADSKEKTDLRLIYLALAHMIKYRGHFLYEESFDIKNNDIQKIFSEFISIYDNTFEGSSLSGQNAQVEAIFTDKISKSAKRERILKLFAYEKSTDLFSEFLKLIVGNQADFKKHFDLEEKAPLQFSKDTYDEDLENLLGQIGDDFADLFLVAKKLYDAILLSGILTVTDSSTKAPLSASMIERYENHQKDLAALKQFIQNNLQEKYDEVFSDQSKDGYARYINGKTTQEAFYKYIKNLLSKFEGSDYFLDKIEREDFLRKQRTFDNGSIPHQIHLQEMNAIIRRQGEHYPFLKEYKEKIETILTFRIPYYVGPLARGNRNFAWLTRNSDQAIRPWNFEEIVDQASSAEEFINKMTNYDLYLPEEKVLPKHSLLYETFAVYNELTKVKFISEGLRDYQFLDSGQKKQIVNQLFKEKRKVTEKDIIQYLHNVDGYDGIELKGIEKQFNASLSTYHDLLKIIKDKEFMDDPKNEEILENIVHTLTIFEDREMIKQRLAQYASIFDKKVIKALTRRHYTGWGKLSAKLINGICDKKTGKTILDYLIDDGYSNRNFMQLINDDGLSFKDIIQKAQVVGKTNDVKQVVQELPGSPAIKKGILQSIKLVDELVKVMGHAPESIVIEIARENQTTARGKKNSQQRYKRIEDALKNLAPGLDSNILKEHPTDNIQLQNDRLFLYYLQNGKDMYTGEALDINQLSSYDIDHIVPQAFIKDDSLDNRVLTSSKDNRGKSDNVPSLEVVQKRKAFWQQLLDSKLISEHKFNNLTKAERGGLDERDKVGFIRRQLVETRQITKHVAQILDARFNTEVNEKDKKNRTVKIITLKSNLVSNFRKEFKLYKVREINDYHHAHDAYLNAVVAKAILKKYPKLEPGFVYGDYQKYDIKRYISRSKDPKEVEKATEKYFFYSNLLNFFKEEVHYADGTIVKRENIEYSKDTGEIAWNKEKDFATIKKVLSLPQVNIVKKTEIQTHGLDRGKPRGLFNSNPSPKPSEDRKENLVPIKQGLDPRKYGGYAGISNSYAVLVKAIIEKGAKKQQKTVLEFQGISILDKINFEKNKENYLLEKGYIKILSTITLPKYSLFEFPDGTRRRLASILSTNNKRGEIHKGNELVIPEKYTTLLYHAKNINKTLEPEHLEYVEKHRNDFAKLLEYVLNFNDKYVGALKNGERIRQAFIDWETVDIEKLCFSFIGPRNSKNAGLFELTSQGSASDFEFLGVKIPRYRDYTPSSLLNATLIHQSITGLYETRIDLSKLGED

SEQ ID NO: 68 - protein, 1377 aa, Streptococcus sp.
MNNKPYSIGLDIGTNSVGWSVITDDYKVPSKKMKVLGNTDKRFIKKNLIGALLFDEGTTAEARRLKRTARRRYTRRKNRLRYLQEIFAEEMSKVDSSFFHRLDDSFLIPEDKRGSKYPIFATLVEEKEYHKQFPTIYHLRKQLADSKEKADLRLIYLVLAHMIKYRGHFLYEEAFDIKNNDIQKIFNEFISIYDNTFEGSSLSGQNAQVETIFTDKISKSAKRERVLKLFPDEKSTGLFSEFLKLIVGNQADFKKHFDLEEKAPLQFSKDTYDEDLENLLEQIGDDFADLFVAAKKLYDAILLSGILTVTDPSTKAPLSASMIERYENHQKDLAVLKQFIKTNLPEKYVEVFSDQSKDGYAGYIDGKTTQEAFYKYIKNLLSKFDGADYFLDKIEREVFLRKQRTFDNGSIPHQIHLQEMNTILRRQGEHYPFLKENKEKIEKILTFRIPYHVGPLARGNRDFAWLTRNSDQAIRPWNFEEIVDKASSAEDFINKMTNYDLYLPEEKVLPKHSLLYETFAVYNELTKVKFIAEGMRDYQFLDSGQKKKIINQLFKKKRKVTEDDIIDCLQKIDNYDGIELKGIEKQFNASLSTYHDILKIIRDKEFMDDPKNGDILENVIHTLTIFEDREMIKQRLAQYNSIFDEKVIKALSRKHYTGWGKLSAKLIDGIRDKQTGKTILDYLMDDGKSNRNFMQLIKDDELSFTEIIQKAQVVGDTDNLRQVVQNLPGSPAIKKGILQSIKIVDELVKVMGHAPESIVIEMARENQTTARGKKNSQQRYKRIEDSLKNLASGLDSNILKENPTDNIQLQNDRLFLYYLQNGKDMYTGEALNINQLSSYDIDHIIPQAFIKDDSLDNRVLTSSKDNRGKSDNVPSLEVVEKMKAFWQQLLDSKLISERKYNNLTKAERERGGLNELDKVGFIKRQLVETRQITKHVAQILDARFNKEVTEKNKKNRNVKIITLKSNMVSNFRKEFGLYKVREINDYHHAHDAYLNAVVAKAILKKYPKLEPEFVYGDYQKYDLKRYISRSKDPKEVEKATEKYFFYSNLLNFFKEEVHYADGTIVKRENIEYSKDTGEIAWNKEKDFATIKKVLSLPQVNIVKKTEEQTVGQNGGLFDNNIVSKKKVVDASKLIPIKSGLSPEKYGGYARPTIAYSVLVTYKQNNKIKNTMVGIPVLTKLEFERDPNLYLRNLGINNVSHVIKLVKYTVLEFKHKYGTYRRFIVSNQELKRANQIFVTTKQMKLISQYTTLDKNEHDSLLKNNQQLIQSIWNQFLEFMLATDLVNKKQYDELILTNNQTIEECRNIMNRVITTLSFTNINAGQKKIIFDDTLSLPIKRWQFTDSDKMVKKIIESTLIHQSITGLYETRIDLSKLGED

SEQ ID NO: 69 - protein, 1345 aa, Streptococcus mutans; identical to SEQ ID NO: 30

SEQ ID NO: 70 - protein, 1345 aa, Streptococcus mutans
MKKPYSIGLDIGTNSVGWAVVTDDYKVPAKKMKVLGNTDKSHIKKNLLGALLFDSGNTAEDRRLKRTARRRYTRRRNRILYLQEIFSEEMGKVDDSFFHRLEDSFLVTEDKRGERHPIFGNLEEEVKYHENFPTIYHLRQYLADNPEKTDLRLVYLALAHIIKFRGHFLIEGKFDTRNNDVQRLFQEFLAVYDNTFENSSLQEQNVQVEEILTDKISKSAKKDRVLKLFPNEKSNGRFAEFLKLIVGNQADFKKHFELEEKAPLQFSKDIYEEELEVLLAQIGDNYAELFLSAKKLYDSILLSGILTVTDVSTKAPLSASMIQRYNEHQMDLAQLKQFIRQKLSDKYNEVFSDVSKDGYAGYIDGKTNQEAFYKYLKGLLNKIEGSGYFLDKIEREDFLRKQRTFDNGSIPHQIHLQEMRAIIRRQAEFYPFLADNQDRIEKILTFRIPYYVGPLARGKSDFAWLSRKSADKITPWNFDEIVDKESSAEAFINRMTNYDLYLPNQKVLPKHSLLYEKFTVYNELTKVKYKTEQGKTAFFDANMKQEIFDGVFKVYRKVTKDKLMDFLEKEFDEFRIVDLTGLDKENKAFNASYGTYHDLRKILDKDFLDNSKNEKILEDIVLTLTLFEDREMIRKRLKNYSDLLTKEQLKKLERRHYTGWGRLSAELIHGIRNKESRKTILDYLIDDGNSNRNFMQLINDDALSFKEEIAKAQVIGETDNLNQVVSDIAGSLAIKKGILQSLKIVDELVKIMGHQPENIVVEMARENQFTNQGRRNSQQRLKGLTDSIKEFGSQILKEHPVENSQLQNDRLFLYYLQNGRDMYTGEELDIDYLSQYDIDHIIPQAFIKDNSIDNRVLTSSKENRGKSDDVPSKDVVRKMKSYWSKLLSAKLITQRKFDNLTKGERGGLTDDDKAGFIKHQLVETRQITKHVARILDERFNTETDENNKKIRQVKIVTLKSNLVSNFRKEFELYKVREINDYHHAHDAYLNAVIGKALLGVYPQLEPEFVYGDYPHFHGHKENKATAKKFFYSNIMNFFKKDDVRTDKNGEIIWKKDEYISNIKKVLSYPQVNIVKKVEEQTGGFFKESILPKGDSDKLIPRKTKKFYWDTKKYGGFDSPIVAYSILVIADIEKGKSKKLKTVKALVGVTIMEKMTFERDPVAFLERKGYRNVQEENIIKLPKYSLFKLENGRKRLLASARELQKGNEIVLPNHLGTLLYHAKNIHKVDEPKHLDYVDKHKDEFKELLDVVSNFSKKYTLAEGNLEKIKELYAQNNGEDLKELASSFINLLTFTAIGAPATFKFFDKNIDRKRYTSTTEILNATLIHQSITGLYETRIDLSKLGGD

SEQ ID NO: 71 - protein, 1345 aa, Streptococcus mutans; identical to SEQ ID NO: 39

SEQ ID NO: 72 - protein, 1350 aa, Streptococcus mutans; identical to SEQ ID NO: 12

SEQ ID NO: 73 - protein, 1386 aa, Streptococcus anginosus
MNQKYSIGLDIGTNSVGWAVITDDYKVPAKKMKVLGNTDKQSIKKNLLGALLFDSGETAEATRLKRTARRRYTRRRNRLRYLQEIFAEEMMQVDESFFQRLDDSFLVDEDKRGERHPIFGNIAAEVKYHDEFPTIYHLRKHLADISQKADLRLVYLALAHMIKFRGHFLIEGQLKAENTNVQALFKDFVEVYDKTVEESHLSEITVDALSILTEKVSKSRRLENLIAHYPAEKKNTLFGNLIALFLGLQPNFKTNFQLSEDAKLQFSKDTYEEDLEGLLGEVGDEYADLFASAKNLYDAILLSGILTVDDNSTKAPLSASMVKRYEEHQKDLKKFEDFIKVNALDQYNAIFKDKNKKGYAGYIESGVKQDEFYKYLKGILLQINGSGDFLDKIDREDFLRKQRTFDNGSIPHQIHLQEMHAILRRQGEHYPFLKENQDKIEKILTFRIPYYVGPLARKGSRFAWAEYKADEKITPWNFDDILDKEKSAEKFITRMTLNDLYLPEEKVLPKHSLLYETFTVYNELTKVKYVNEQGEAKFFDANMKQEIFDHVFKENRKVTKDKLLNYLNKEFEEFRIVNLTGLDKENKVFNSSLGTYHDLRKILNKSFLDNKENAQIIEDIIQTLTLFEDREMIRQRLQKYSDIFTKAQLKKLERRHYTGWGRLSYKLINGIRNKENKKTILDYLIDDGYANRNFMQLINDDALSFKEEIAKAQIIGDVDDIANVVHDLPGSPAIKKGILQSVKIVDELVKVMGHNPANIIIEMARENQTTDRGRRNSQQRLKLLQDSLKNLDNPVNIKNVENQQLQNDRLFLYYIQNGKDMYTGETLDINNLSQYDIDHIIPQAYIKDDSFDNRVLTSSSENRGKSDNVPSIEVVCARKADWMRLRKAGLISQRKFDNLTKAERGGLTENDKAGFIKRQLVETRQITKHVAQVLDARFNAKHDENKKVIRDVKIITLKSNLVSQFRKDFKFYKVREINDYHHAHDAYLNAVIGTALLKKYPKLASEFVYGEFKKYDVRKFIAKSDKEIGKATAKYFFYSNLMNFFKKEVKFADGTVVERPDIETSEDGEIAWNKQTDFKIVRKVLSYPQVNIVKKTEVQTHGLDRGKPRGLFNANPSPKPKPDSSENLVGVKRNLDPKKYGGYAGISNSYAVLVKAIIEKGVKKKETMVLEFQGISILDRITFEKDKRAFLLGKGYKDIKKIIELPKYSLFELKDGSRRMLASILSTNNKRGEIHKGNELFVPQKFTTLLYHAKRINNPINKDHIEYVKKHRDDFKELLNYVLEFNEKYVGATKNGERLKEAVADFDSKSNEEICTSFLGAVNSKNAGLFELTSLGSASDFEFLGVKIPRYRDYTPSSLLKDSTLIHQSITGLYETRIDLSKLGED

SEQ ID NO: 74 - protein, 1345 aa, Streptococcus mutans
MKKPYSIGLDIGTNSVGWAVVTDDYKVPAKKMKVLGNTDKSHIKKNLLGALLFDSGNTAEDRRLKRTARRRYTRRRNRILYLQEIFSEEMGKVDDSFFHRLEDSFLVTEDKRGERHPIFGNLEEEVKYHENFPTIYHLRQYLADNPEKTDLRLVYLALAHIIKFGGHFLIEGKFDTRNNDVQRLFQEFLAVYDNTFENSSLQEQNVQVEEILTDKISKSAKKDRVLKLFPNEKSNGRFAEFLKLIVGNQADFKKHFELEEKAPLQFSKDIYEEELEVLLAQIGDNYAELFLSAKKLYDSILLSGILTVTDVSTKAPLSASMIQRYNEHQMDLAQLKQFIRQKLSDKYNEVFSDVSKDGYAGYIDGKTNQEAFYKYLKGLLNKIEGSGYFLDKIEREDFLRKQRTFDNGSIPHQIHLQEMRAIIRRQAEFYPFLADNQDRIEKILTFRIPYYVGPLARGKSDFAWLSRKSADKITPWNFDEIVDKESSVEAFINRMTNYDLYLPNQKVLPKHSLLYEKFTVYNELTKVKYKTEQGKTAFFDANMKQEIFDGVFKVYRKVTKDKLMDFLEKEFDEFRIVDLTGLDKENKAFNASYGTYHDLRKILDKDFLDNSKNEKILEDIVLTLTLFEDREMIRKRLKNYSDLLTKEQLKKLERRHYTGWGRLSAELIHGIRNKESRKTILDYLIDDGNSNRNFMQLINDDALSFKEEIAKAQVIGETDNLNQVVSDIAGSPAIKKGILQSLKIVDELVKIMGHQPENIVVEMARENQFTNQGRRNSQQRLKGLTDSIKEFGSQILKEHPVENSQLQNDRLFLYYLQNGRDMYTGEELDIDYLSQYDIDHIIPQAFIKDNSIDNRVLTSSKENRGKSDDVPSKNVVRKMKSYWSKLLSAKLITQRKFDNLTKAERGGLTDDDKAGFIKRQLVETRQITKHVARILDERFHTETDENNKKIRQVKIVTLKSNLVSNFRKEFELYKVREINDYHHAHDAYLNAVIGKALLGVYPQLEPEFVYGDYPHFHGHKENKATAKKFFYSNIMNFFKKDDVRTDKNGEIIWKKDEHISNIKKVLSYPQVNIVKKVEEQTGGFSKESILPKGNSDKLIPRKTKKFYWDTKKYGGFDSPIVAYSILVIADIEKGKSKKLKTVKALVGVTIMEKMTFERDPVAFLERKGYRNVQEENIIKLPKYSLFKLENGRKRLLASARELQKGNEIVLPNHLGTLLYHAKNIHKVDEPKHLDYVDKHKDEFKELLDVVSNFSKKYTLAEGNLEKIKELYAQNNGEDLKELASSFINLLTFTAIGAPATFKFFDKNIDRKRYTSTTEILNATLIHQSITGLYETRIDLSKLGGD

SEQ ID NO: 75 - protein, 1375 aa, Streptococcus canis
MEKKYSIGLDIGTNSVGWAVITDDYKVPSKKFKVLGNTNRKSIKKNLMGALLFDSGETAEATRLKRTARRRYTRRKNRIRYLQEIFANEMAKLDDSFFQRLEESFLVEEDKKNERHPIFGNLADEVAYHRNYPTIYHLRKKLADSPEKADLRLIYLALAHIIKFRGHFLIEGKLNAENSDVAKLFYQLIQTYNQLFEESPLDEIEVDAKGILSARLSKSKRLEKLIAVFPNEKKNGLFGNIIALALGLTPNFKSNFDLTEDAKLQLSKDTYDDDLDELLGQIGDQYADLFSAAKNLSDAILLSDILRSNSEVTKAPLSASMVKRYDEHHQDLALLKTLVRQQFPEKYAEIFKDDTKNGYAGYVGIGIKHRKRTTKLATQEEFYKFIKPILEKMDGAEELLAKLNRDDLLRKQRTFDNGSIPHQIHLKELHAILRRQEEFYPFLKENREKIEKILTFRIPYYVGPLARGNSRFAWLTRKSEEAITPWNFEEVVDKGASAQSFIERMTNFDEQLPNKKVLPKHSLLYEYFTVYNELTKVKYVTERMRKPEFLSGEQKKAIVDLLFKTNRKVTVKQLKEDYFKKIECFDSVEIIGVEDRFNASLGTYHDLLKIIKDKDFLDNEENEDILEDIVLTLTLFEDREMIEERLKTYAHLFDDKVMKQLKRRHYTGWGRLSRKMINGIRDKQSGKTILDFLKSDGFSNRNFMQLIHDDSLTFKEEIEKAQVSGQGDSLHEQIADLAGSPAIKKGILQTVKIVDELVKVMGHKPENIVIEMARENQTTTKGLQQSRERKKRIEEGIKELESQILKENPVENTQLQNEKLYLYYLQNGRDMYVDQELDINRLSDYDVDHIVPQSFIKDDSIDNKVLTRSVENRGKSDNVPSEEVVKKMKNYWRQLLNAKLITQRKFDNLTKAERGGLSEADKAGFIKRQLVETRQITKHVARILDSRMNTKRDKNDKPIREVKVITLKSKLVSDFRKDFQLYKVRDINNYHHAHDAYLNAVVGTALIKKYPKLESEFVYGDYKVYDVRKMIAKSEQEIGKATAKRFFYSNIMNFFKTEVKLANGEIRKRPLIETNGETGEVVWNKEKDFATVRKVLAMPQVNIVKKTEVQTGGFSKESILSKRESAKLIPRKKGWDTRKYGGFGSPTVAYSILVVAKVEKGKAKKLKSVKVLVGITIMEKGSYEKDPIGFLEAKGYKDIKKELIFKLPKYSLFELENGRRRMLASATELQKANELVLPQHLVRLLYYTQNISATTGSNNLGYIEQHREEFKEIFEKIIDFSEKYILKNKVNSNLKSSFDEQFAVSDSILLSNSFVSLLKYTSFGASGGFTFLDLDVKQGRLRYQTVTEVLDATLIYQSITGLYETRTDLSQLGGD

SEQ ID NO: 76 - protein, 1368 aa, Streptococcus pyogenes
MDKKYSIGLDIGTNSVGWAVITDDYKVPSKKFKVLGNTDRHSIKKNLIGALLFDSGEIAEATRLKRTARRRYTRRKNRICYLQEIFSNEMAKVDDSFFHRLEESFLVEEDKKHERHPIFGNIVDEVAYHEKYPTIYHLRKKLVDSTDKADLRLIYLALAHMIKFRGHFLIEGDLNPDNSDVDKLFIQLVQTYNQLFEENPINASGVDAKAILSARLSKSRRLENLIAQLPGEKKNGLFGNLIALSLGLTPNFKSNFDLAEDAKLQLSKDTYDDDLDNLLAQIGDQYADLFLAAKNLSDAILLSDILRLNSEITKAPLSASMIKRYDEHHQDLTLLKALVRQQLPEKYKEIFFDQSKNGYAGYIDGGASQEEFYKFIKPILEKMDGTEELLAKLNREDLLRKQRTFDNGSIPHQIHLGELHAILRRQEDFYPFLKDNREKIEKILTFRIPYYVGPLARGNSRFAWMTRKSEETITPWNFEEVVDKGASAQSFIERMTNFDKNLPNEKVLPKHSLLYEYFTVYNELTKVKYVTEGMRKPAFLSGEQKKAIVDLLFKTNRKVTVKQLKEDYFKKIECFDSVEISGVEDRFNASLGTYHDLLKIIKDKDFLDNEENEDILEDIVLTLTLFEDREMIEERLKTYAHLFDDKVMKQLKRRRYTGWGRLSRKLINGIRDKQSGKTILDFLKSDGFANRNFMQLIHDDSLTFKEDIQKAQVSGQGDSLHEHIANLAGSPAIKKGILQTVKVVDELVKVMGRHKPENIVIEMARENQTTQKGQKNSRERMKRIEEGIKELGSQILKEHPVENTQLQNEKLYLYYLQNGRDMYVDQELDINRLSDYDVDHIVPQSFIKDDSIDNKVLTRSDKNRGKSDNVPSEEVVKKMKNYWRQLLNAKLITQRKFDNLTKAERGGLSELDKAGFIKRQLVETRQITKHVAQILDSRMNTKYDENDKLIREVKVITLKSKLVSDFRKDFQFYKVREINNYHHAHDAYLNAVVGTALIKKYPKLESEFVYGDYKVYDVRKMLAKSEQEIGKATAKYFFYSNIMNFFKTEITLANGEIRKRPLIETNGETGEIVWDKGRDFATVRKVLSMPQVNIVKKTEVQTGGFSKESILPKRNSDKLIARKKDWDPKKYGGFDSPTVAYSVLVVAKVEKGKSKKLKSVKELLGITIMERSSFEKNPIDFLEAKGYKEVRKDLIIKLPKYSLFELENGRKRMLASAGELQKGNELALPSKYVNFLYLASHYEKLKGSPEDNEQKQLFVEQHKHYLDEIIEQISEFSKRVILADANLDKVLSAYNKHRDKPIREQAENIIHLFTLTNLGAPTAFKYFDTTIDRKRYTSTKEVLDATFIHQSITGLYETRIDLSQLGGD

SEQ ID NO: 77 - protein, 1370 aa, Streptococcus agalactiae
MNKPYSIGLDIGTNSVGYSVVTDDYKVPAKKMRVLGNTDKEYIKKNLIGALLFDGGNTASDRRLKRTARRRYTRRRNRILYLQEIFAEEMSKVDDSFFHRLEDSFLVEDDKRGSKYPIFATMQEEKDYHEKFPTIYHLRKELADKKEKADLRLVYLALAHIIKFRGHFLIEDDSFDVRNTDIQRQYQAFLEIFDTTFENNHLLSQNIDVEGILTDKISKSAKKDRILAQYPNQKSTGIFAEFLKLIVGNQADFKKHFNLEDKTPLQFAKDSYDEDLENLLGQIGDEFADLFSVAKKLYDSVLLSGILTVTDLSTKAPLSASMIQRYDEHREDLKQLKQFVKASLPEKYQEIFTDSSKDGYAGYIEGKTNQGAFYKYLSKLLTKQEGSEYFLEKIKNEDFLRKQRTFDNGSIPHQVHLTELKAIIRRQSEYYPFLKENLDRIEKILTFRIPYYVGPLAREKSDFAWMTRKTDDSIRPWNFEELVDKEASAEAFIHRMTNNDLYLPEEKVLPKHSLIYEKFTVYNELTKVRYKNEQGETYFFDSNIKQEIFDGVFKEHRKVSKKKLLDFLAKEYEEFRIVDVIGLDKENKAFNASLGTYHDLKKILDKDFLDNPDNESILEDIVQTLTLFEDREMIKKRLENYKDLFTESQLKKLYRRHYTGWGRLSAKLINGIRDKESQKTILDYLISDGRANRNFMQLIHDDGLSFKPIIDKAQAGSHSDNLKEVVGELAGSPAIKKGILQSLKIVDELVKVMGYEPEQVVVEMARENQTTNQGRRNTRQRYKLLEEGVKNLASDLNGNILKEYPTDNQALQNERLFLYYLQNGRDMYTGEALDIDNLSQYDIDHIVPQAFIKDDSIDNRVLVSSAKNRGKSDNVPSIDIVKARKAFWKKLLDAKLMSQRKYDNLTKAERGGLTSDDKARFIQRQLVETRQITKHVARILDERFNNELDSKGRRIRKVKIVTLKSNLVSNFRKEFGFYKIREVNDYHHAHDAYLNAVVAKAILTKYPQLEPEFVYGDYPKYNSYKTRKSATEKLFFYSNIMNFFKTKVTLADGTVVVKDDIEVNNDTGEIVWDKKKHFATVRKVLSYPQVNIVKKTEIQTGGFSKESILAHGNSDKLIPRKTKDIYLDPKKYGGFDSPIVAYSVLVVADIKKGKAQKLKTVTELLGITIMERFRFEKNPSAFLESKGYLNIRDDKLMILPKYSLFELENGRRRLLASAGELQKGNELALPTQYMKFLYLASRYNELKGKPEEIEQKQEFVVQHVSYFDDILQIINDFSNRVILADANLEKINKLYQDNKENISVDELANNIINLFTFTSLGAPAAFKFFDKIVDRKRYTSTKEVLNSTLIHQSITGLYETRIDLGKLGED

SEQ ID NO: 78 - protein, 1378 aa, Streptococcus agalactiae
MNKPYSIGLDIGTNSVGWSIITDDYKVPAKKMRVLGNTDKEYIKKNLIGALLFDGGNTAADRRLKRTARRRYTRRRNRILYLQEIFAEEMSKVDDSFFHRLEDSFLVEEDKRGSKYPIFATMQEEKYYHEKFPTIYHLRKELADKKEKADLRLIYLALAHIIKFRGHFLIEDDRFDVRNTDIQKQYQAFLEIFDTTFENNDLLSQNVDVEAILTDKISKSAKKDRILARYPNQKSTGIFAEFLKLIVGNQADFKKHFNLEDKTPLQFAKDSYDEDLENLLGQIGDEFADLFSAAKKLYDSVLLSGILTVIDLSTKAPLSASMIQRYDEHHEDLKHLKQFVKASLPENYREVFADSSKDGYAGYIEGKTSQEAFYKYLLKLLTKQEGSEYLLEKIKNEDFLRKQRTFDNGSIPHQVHLTELRAIIRRQSEYYPFLKENLDRIEKILTFRIPYYVGPLAREKSDFAWMTRKTDDSIRPWNFEDLVDKEKSAEAFIHRMTNNDLYLPEEKVLPKHSLIYEKFTVYNELTKVRFLAEGFKDFQFLNRKQKETIFNSLFKEKRKVTEKDIISFLNKVDGYEGIAIKGIEKQFNASLSTYHDLKKILGKDFLDNTDNELILEDIIQTLTLFEDREMIKKRLDIYKDFFTESQLKKLYRRHYTGWGRLSAKLINGIRNKENQKTILDYLIDDGSANRNFMQLIKDAGLSFKPIIDKARTGSHSDNLKEVVGELAGSPAIKKGILQSLKIVDELVKVMGYEPEQIVVEMARENQTTAKGLSRSRQRLTTLRESLGNLKSNILEEKKPKYVKDQVENHHLSDDRLFLYYLQNGKDMYTDDELDIDNLSQYDIDHIIPQAFIKDDSIDNRVLVSSAKNRGKSDDVPSIEIVKARKMFWKNLLDAKLMSQRKYDNLTKAERGGLTSDDKARFIQRQLVETRQITKHVARILDERFNNELDSKGRRIRKVKIVTLKSNLVSNFRKEFGFYKIREVNNYHHAHDAYLNAVVAKAILTKYPQLEPEFVYGLYRRKKLSKIVREDKEEKYSEATRKMFFYSNLMNMFKRVVRLADGSIVVRPVIETGRYMGKTAWDKKKHFATVRKVLSYPQNNIVKKTEIQTGGFSKESILAHGNSDKLIPRKTKDIYLDPKKYGGFDSPIVAYSVLVVADIKKGKAQKLKTVTELLGITIMERSRFEKNTSAFLESKGYLNIRDDKLMILPKYSLFELENGRRRLLASAGELQKGNELALPTQFMKFLYLASRYNESKGKPEEIEKKQEFVNQHVSYFDDILQLINDFSNRVILADANLEKINKLYQDNKENIPVDELANNIINLFTFTSLGAPAAFKFFDKIVDRKRYTSTKEVLNSTLIHQSITGLYETRIDLGKLGEG

SEQ ID NO: 79 - protein, 1338 aa, Streptococcus mutans
MDLIGTNSVGWAVVTDDYKVPAKKMKVLGNTDKSHIKKNLLGALLFDSGNTAADRRLKRTARRRYTRRRNRILYLQEIFAEEMSKVDDSFFHRLEDSFLVTEDKRGERHPIFGNLEEEVKYHENFPTIYHLRQYLADNPEKVDLRLVYLALAHIIKFRGHFLIEGKFDTRNNDVQRLFQEFLAVYDNTFENSSLQEQNVQVEEILTDKISKSAKKDRVLKLFPNEKSNGRFAEFLKLIVGNQADFKKHFELEEKAPLQFSKDTYEEELEVLLAQIGDNYAELFLSAKKLYDSILLSGILTVTDVSTKAPLSASMIQRYNEHQMDLAQLKQFIRQKLSDKYNEVFSDVSKDGYAGYIDGKTNQEAFYKYLKGLLNKIEGSGYFLDKIEREDFLRKQRTFDNGSIPHQIHLQEMRAIIRRQAEFYPFLADNQDRIEKILTFRIPYYVGPLARGKSDFAWLSRKSADKITPWNFDEIVDKESSAEAFINRMTNYDLYLPNQKVLPKHSLLYEKFTVYNELTKVKYKTEQGKTAFFDANMKQEIFDGVFKVYRKVTKDKLMDFLEKEFDEFRIVDLTGLDKENKAFNASYGTYHDLRKILDKDFLDNSKNEKILEDIVLTLTLFEDREMIRKRLENYSDLLTKEQVKKLERRHYTGWGRLSAELIHGIRNKESRKTILDYLIDDGNSNRNFMQLINDDALSFKEEIAKAQVIGETDNLNQVVSDIAGSPAIKKGILQSLKIVDELVKIMGHQPENIVVEMARENQFTNQGRRNSQQRLKGLTDSIKEFGSQILKEHPVEHSQLQNDRLFLYYLQNGRDMYTGEELDIDYLSQYDIDHIIPQAFIKDNSIDNRVLTSSKENRGKSDDVPSKNVVRKMKSYWSKLLSAKLITQRKFDNLTKAERGGLTDDDKAGFIKRQLVETRQITKHVARILDERFHTETDENNKKIRQVKIVTLKSNLVSNFRKEFELYKVREINDYHHAHDAYLNAVIGKALLGVYPQLEPEFVYGDYPHFHGHKENKATAKKFFYSNIMNFFKKDDVRTDKNGEIIWKKDEHISNIKKVLSYPQVNIVKKVEEQTGGFSKESILPKGNSDKLIPRKTKKFYWDTKKYGGFDSPIVAYSILVIADIEKGKSKKLKTVKALVGVTIMEKMTFERDPVAFLERKGYRNVQEENIIKLPKYSLFKLENGRKRLLASARELQKGNEIVLPNHLGTLLYHAKNIHKVDEPKHLDYVDKHKDEFKELLDVVSNFSKKYTLAEGNLEKIKELYAQNNGEDLKELASSFINLLTFTAIGAPATFKFFDKNIDRKRYTSTTEILNATLIHQSITGLYETRIDLSKLGGD

SEQ ID NO: 80 - protein, 1345 aa, Streptococcus mutans
MKKPYSIGLDIGTNSVGWAVVTDDYKVPAKKMKVLGNTDKSHIKKNLLGALLFDSGNTAEDRRLKRTARRRYTRRRNRILYLQEIFSEEMGKVDDSFFHRLEDSFLVTEDKRGERHPIFGNLEEEVKYHENFPTIYHLRQYLADNPEKVDLRLVYLALAHIIKFRGHFLIEGKFDTRNNDVQRLFQEFLAVYDNTFENSSLQEQNVQVEEILTDKISKSAKKDRVLKLFPNEKSNGRFAEFLKLIVGNQADFKKHFELEEKAPLQFSKDTYEEDLEELLGKIGDDYADLFTLAKNLYDAILLSGILTADDSSTKAPLSASMIQRYNEHQMDLAQLKQFIRQKLSDKYNEVFSDVSKDGYAGYIDGKTNQEAFYKYLKGLLNKIEGSGYFLDKIEREDFLRKQRTFDNGSIPHQIHLQEMRAIIRRQAEFYPFLADNQDRIEKILTFRIPYYVGPLARGKSDFAWLSRKSADKITPWNFDEIVDKESSAEAFINRMTNYDLYLPNQKVLPKHSLLYEKFTVYNELTKVKYKTEQGKTAFFDANMKQEIFDGVFKVYRKVTKDKLMDFLEKEFDEFRIVDLTGLDKENKVFNASYGTYHDLCKILDKDFLDNSKNEKILEDIVLTLTLFEDREMIRKRLENYSDLLTKEQVKKLERRHYTGWGRLSAELIHGIRNKESRKTILDYLIDDGNSNRNFMQLINDDALSFKEEIAKAQVIGETDNLNQVVSDIAGSPAIKKGILQSLKIVDELVKIMGHQPENIVVEMARENQFTNQGRRNSQQRLKGLTDSIKEFGSQILKEHPVENSQLQNDRLFLYYLQNGRDMYTGEELDIDYLSQYDIDHIIPQAFIKDNSIDNRVLTSSKENRGKSDDVPSKDVVRKMKSYWSKLLSAKLITQRKFDNLTKAERGGLTDDDKAGFIKRQLVETRQITKHVARILDERFYTETDENNKKIRQVKIVTLKSNLVSNFRKEFELYKVREINDYHHAHDAYLNAVIGKALLGVYPQLEPEFVYGDYPHFHGHKENKATAKKFFYSNIMNFFKKDDVRTDKNGEIIWKKDEHISNIKKVLSYPQVNIVKKVEEQTGGFSKESILPKGNSDKLIPRKTKKFYWDTKKYGGFDSPIVAYSILVIADIEKGKSKKLKTVKALVGVTIMEKMTFERDPVAFLERKGYRNVQEENIIKLPKYSLFKLENGRKRLLASARELQKGNEIVLPNHLGTLLYHAKNIHKVDEPKHLDYVDKHKDEFKELLDVVSNFSKKYTLAEGNLEKIKELYAQNNGEDLKELASSFINLLTFTAIGAPATFKFFDKNIDRKRYTSTTEILNATLIHQSITGLYETRIDLSKLGGD

SEQ ID NO: 81 - protein, 1355 aa, Streptococcus mutans
MKKPYSIGLDIGTNSVGWAVVTDDYKVPAKKMKVLGNTDKSHIKKNLLGALLFDSGNTAEDRRLKRTARRRYTRRRNRILYLQEIFAEEMSKVDDSFFHRLDESFLTDDDKNFDSHPIFGNKAEEDAYHQKFPTIYHLRKHLADSTEKADLRLVYLALAHMIKFRGHFLIEGELNAENTDVQKLFADFVGVYDRTFDDSHLSEITVDASSILTEKISKSRRLEKLINNYPKEKKNTLFGNLIALSLGLQPNFKTNFKLSEDAKLQFSKDTYEEDLEELLGKIGDDYADLFTLAKNLYDAILLSGILTADDSSTKAPLSASMIKRYAEHHEDLEKLKEFIKANKPELYHDIFKDETKNGYAGYIENGVKQDEFYKYLKNTLSKITGSDYFLDQIEREDFLRKQRTFDNGSIPHQIHLQEMHAILRRQGDYYPFLKENQDRIEKILTFRIPYYVGPLARKNSRFAWAEYHSDEAVTPWNFDQVIDKESSAQAFIEHMTNNDLYLPNEKVLPKHSPLYEKYTVYNELTKIKYVTEIGEAKFFDANLKQEIFDGLFKHERKVTKKKLRTFLDKNFDEFRIVDIQGLDKETETFNASYATYQDLLKVIKDKVFMDNPENAEILENIVLTLTLFEDREMIKQRLAKYADVFDKKVIDQLARRHYTGWGRLSAKLLNGIRDKQSCKTIMDYLIDDAQSNRNLMQLITDDNLTFKDDIVKAQYVDNSDDLHQVVQSLAGSPAIKKGILQSLKIVDELVKVMGKEPEQIVVEMARENQTTAKGRRNSQQRYKRLKEAIKSLDRDLNHKILKEHPTDNQALQNNRLFLYYLQNGRDMYTGESLDINRLSDYDIDHVIPQAFIKDNSIDNRVLTSSKANRGKSDDVPSEDVVNRMRPFWNKLLSSGLISQRKYNNLTKKELTLDDKAGFIKRQLVETRQITKHVARMLDERFNKEFDDNNKRIRRVKIVTLKSNLVSSFRKEFELYKVREINDYHHAHDAYLNAVVVKALLVKYPKLEPEFVYGEYPKYNSYRERKTATQKMFFYSNIMNMFKSKVKLADDQIVERPMIEVNDETGEIAWDKTKHITTVKKVLSYPQVNIVKKVEEQTIGQNGGLFDDNPKSPLEVIPSKLVPLKKALNPEKYGGYQKPTTAYPILLIVDTKQLIPISVMDKKRFEQNPVKFLKDKGYQQIEKNNFVKLPKYTLVDIGNGIKRLWASSKEVHKGNQLVVSKKSQDLLYHAHHLDNDYSNEYVKNHYQQFDILFNEITSFSKKCKLGKEHIQKIEEAYSKERDFASIEELADGFIKLLGFTQLGATSPFSFLGIKLNQKQYTGKKDYLLPCMEATLIHQSITGLYETRIDLSKLGGD

SEQ ID NO: 82 - protein, 1337 aa, Streptococcus parauberis
MKVLGNTDRQTVKKNMIGTLLFDSGETAEARRLKRTARRRYTRRINRIKYLQSIFDDEMSKIDSAFFQRIKDSFLVPDDKNDDRHPIFGNIKDEVDYHKNYPTIYHLRKKLADSDEKADLRLIYLALAHIIKFRGHFLIEGDLDSQNTDVNALFLKLVDTYNLMFEDDKIDTQTIDATVILTEKMSKSRRLENLIAKIPNQKKNTLFGNLISLSLGLTPNFKANFELSEDAKLQISKESFEEDLDNLLAQIGDQYADLFIAAKNLSDAILLSDILTVKGVNTKAPLSASMVQRFNEHQDDLKLLKKLVKVQLPEKYKEIFDIKDKNGYAGYINGKTSQEDFYKYIKPILSKLKGAESLISKLEREDFLRKQRTFDNGSIPHQIHLNELKSIIRRQEKYYPFLKDKQVRIEKIFTFRIPYFVGPLANGNSSFAWVKRRSNESITPWNFEEVVEQEASAKVFIERMTNFDTYLPEEKVLPKHSLLYEMFTVYNELTKVKYQAEGMRKPEFLSSEEKIEIVSNLFKTERKVTVKQLKENYFNKIRCLDSITISGVEDKFNASLGTYHDLLNIIKNQKILDDEQNQDSLEDIVLTLTLFEDEKMIAKRLSKYESIFDPSILKKLKKRHYTGWGRLSQKLINGIRDKQTGKTILDFLIEDGQANRNFMQLINDPSLDFASIIKEAQEKTIKSEKLEETIANLAGSPAIKKGILQSVKIVDEVVKVMGYEPSNIVIEMARENQSTQRGINNSRERLRKLEEVHKNIGSKILKEHEISNAQLQSDRVYLYLLQDGKDMYTGKDLDFDRLSQYDIDHIIPQSFIKDNSIDNIVLTSQESNRGKSDNVPYIAIVNKMKSYWQHQLKSGAISQRKFDNLTKAERGGLSEYDKAGFIKRQLVETRQITKHVAQILNNRFNNNVDDSSKNKRPVKIITLKSKMVSDFRKEFGFYKIREVNDYHHAHDAYLNAVVGTALLKKYPKLEAEFVYGDYKHYDLASLVVKSDTSLGKATAKMFFYSNIMNFFKKEVRLADGTVITRPQIETNTETGEIVWDKVKDIKTIRKVLSIPQINVVKKTEVQTGGFSKESILSKRDSDKLIPRKNNWDPKKYGGFGSPIIAYSVLVVAKVTKGKSQKTKSVKELVGITIMEQNEFEKDRITFLEKKGYQDIQESLIIKLPKFSLFELENGRKRLLASAKELQKGNELSLPNKYIQFLYLASRYTSFSGKEEDREKHRHFVESHLHYFDEIKDIIADFSRRYILADANLEKILTLYNEKNQFSIEEQATNMLNLFTFTGLGAPATLKFFNVDIDRKRYTSSTEILNSTLIRQSITGLYETRIDLSKIGGD

SEQ ID NO: 83 - protein, 1370 aa, Streptococcus agalactiae
MNKPYSIGLDIGTNSVGWSIITDDYKVPAKKMRVLGNTDKEYIKKNLIGALLFDGGNTAADRRLKRTARRRYTRRRNRILYLQEIFAEEMSKVDDSFFHRLEDSFLVEEDKRGSKYPIFATMQEEKYYHEKFPTIYHLRKELADKKEKADLRLIYLALAHIIKFRGHFLIEDDRFDVRNTDIQKQYQAFLEIFDTTFENNDLLSQNVDVEAILTDKISKSAKKDRILARYPNQKSTGIFAEFLKLIVGNQADFKKHFNLEDKTPLQFAKDSYDEDLENLLGQIGDEFADLFSAAKKLYDSVLLSGILTVTDLSTKAPLSASMIQRYDEHREDLKQLKQFVKASLPEKYQEIFADSSKDGYAGYIEGKTNQEAFYKYLSKLLTKQEGSEYLLEKIKNEDFLRKQRTFDNGSIPHQVHLTELRAIIRRQSEYYPFLKENLDRIEKILTFRIPYYVGPLAREKSDFAWMTRKTDDSIRPWNFEDLVDKEKSAEAFIHRMTNNDLYLPEEKVLPKHSLIYEKFTVYNELTKVRFLAEGFKDFQFLNRKQKETIFNSLFKEKRKVTEKDIISFLNKVDGYEGIAIKGIEKQFNASLSTYHDLKKILGKDFLDNTDNELILEDIVQTLTLFEDREMIRKRLDIYKDFFTESQLKKLYRRHYTGWGRLSAKLINGIRNKENQKTILDYLIDDGSANRNFMQLIKDAGLSFKPIIDKARTGSHSDNLKEVVGELAGSPAIKKGILQSLKIVDELVKVMGYEPEQIVVEMARENQTTAKGLSRLRQRLTTLRESLANLKSNILEEKKPKYVKDQVENHHLSDDRLFLYYLQNGKDMYTDDELDIDNLSQYDIDHIIPQAFIKDDSIDNRVLVSSAKNRGKSDDVPSVEIVKDCKVFWKKLLDAKLMSQRKYDNLTKAERGGLTSDDKARFIQRQLVETRQITKHVARILDERFNNELDSKGRRIRKVKIVTLKSNLVSNFRKEFGFYKIREVNNYHHAHDAYLNAVVAKAILTKYPQLEPEFVYGDYPKYNSYKTRKSATEKLFFYSNIMNFFKTKVTLADGTVVVKDDIEVNNDTGEIVWDKKKHFATVRKVLSYPQVNIVKKTEIQTGGFSKESILAHGNSDKLIPRKTKDIYLDPKKYGGFDSPIVAYSVLVVADIKKGKAQKLKTVTELLGITIMERSRFEKNPSAFLESKGYLNIRDDKLMILPKYSLFELENGRRRLLASADELQKGNELALPTQFMKFLYLASRYNELKGKPEEIEQKQEFVVQHVSYFDDILQIINDFSNRVILADANLEKINKLYQDNKENIPVDELANNIINLFTFTSLGAPAAFKFFDKIVDRKRYTSTKEVLNSTLIHQSITGLYETRIDLGKLGED

SEQ ID NO: 84 - protein, 1345 aa, Streptococcus mutans
MKKPYSIGLDIGTNSVGWAVVTDDYKVPAKKMKVLGNTDKSHIEKNLLGALLFDSGNTAEDRRLKRTARRRYTRRRNRILYLQEIFSEEMGKVDDSFFHRLEDFFLVTEDKRGERHPIFGNLEEEVKYHENFPTIYHLRQYLADNPEKVDLRLVYLALAHIIKFRGHFLIEGKFDTRNNDVQRLFQEFLAVYDNTFENSSLQEQNVQVEEILTDKISKSAKKDRVLKLFPNEKSNGRFAEFLKLIVGNQADFKKHFELEEKAPLQFSKDTYEEELEVLLAQIGDNYAELFLSAKKLYDSILLSGILTADDSSTKAPLSASMIQRYNEHQMDLAQLKQFIRQKLSDKYNEVFSDVSKDGYAGYIDGKTNQEAFYKYLKGLLNKIEGSGYFLDKIEREDFLRKQRTFDNGSIPHQIHLQEMRAIIRRQSEFYPFLADNQDRIEKILTFRIPYYVGPLARGKSDFAWLSRKSADKITPWNFDEIVDKESSAEAFINRMTNYDLYLPNQKVLPKHSLLYEKFTVYNELTKVKYKTEQGETAFFDANMKQEIFDGVFKVYRKVTKDKLMDFLEKEFDEFRIVDLTGLDKENKAFNASYGTYHDLRKILDKDFLDNSKNEKILEDIVLTLTLFEDREMIRKRLKNYSDLLTKEQLKKLERRHYTGWGRLSAELIHGIRNKESRKTILDYLIDDGNSNRNFMQLINDDALSFKEEIAKAQVIGETDNLNQVVSDIAGSPAIKKGILQSLKIVDELVKIMGHQPENIVVEMARENQFTNQGRRNSQQRLKGLTDSIKEFGSQILKEHPVENSQLQNDRLFLYYLQNGRDMYTGEELDIDYLSQYDIDHIIPQAFIKDNSIDNRVLTSSKENRGKSDDVPSKDVVRKMKPYWSKLLSAKLITQRKFDNLTKAERGGLTDDDKAGFIKRQLVETRQITKHVARILDERFNTETDENNKKIRQVKIVTLKSNLVSNFRKEFELYKVREINDYHHAHDAYLNAVIGKALLGVYPQLEPEFVYGDYPHFHGHEENKATAKKFFYSNIMNFFKKDDVRTDKNGEIIWKKDEHISNIKKVLSYPQVNIVKKVEEQTGGFSKESILPKGNSDKLIPRKTKKFYWDTKKYGGFDSPIVAYSILVIADIEKGKSKKLKTVKALVGVTIMEKMTFERDPVAFLERKGYRNVQEENIIKLPKYSLFKLENGRKRLLASARELQKGNEIVLPNHLGTLLYHAKNIHKVDEPKHLDYVDKHKDEFKELLDVVSNFSKKYTLAEGNLEKIKELYAQNNGEDLKELASSFINLLTFTAIGAPATFKFFDKNIDRKRYTSTTEILNATLIHQSITGLYETRIDLSKLGGD

SEQ ID NO: 85 - protein, 1345 aa, Streptococcus mutans; identical to SEQ ID NO: 42

SEQ ID NO: 86 - protein, 1370 aa, Streptococcus agalactiae; identical to SEQ ID NO: 5

SEQ ID NO: 87 - protein, 1370 aa, Streptococcus agalactiae; identical to SEQ ID NO: 10

SEQ ID NO: 88 - protein, 1373 aa, Streptococcus bovis
MTKKNYSIGLDIGTNSVGWAVITDDYKVPAKKMKVLGNTDKKYIKKNLLGALLFDSGETAEATRLKRTARRRYTRRKNRLRYLQEIFAEEMTKVDESFFQRLDESFLRWDDDNKKLGRYPIFGNKADVVKYHQEFPTIYHLRKHLADSSEKADLRLVYLALAHMIKFRGHFLIEGELNAENTDVQKIFADFVGVYDRTFDDSHLSEITVDAASILTEKISKSRRLENLIKYYPTEKKNTLFGNLIALALGLQPNFKMNFKLSEDAKLQFSKDSYEEDLGELLGKIGDDYADLFTSAKNLYDAILLSGILIVDDNSTKAPLSASMIKRYVEHQEDLEKLKEFIKANKSELYHDIFKDKNKNGYAGYIENGVKQDEFYKYLKNTLSKIAGSDYFLDKIEREDFLRKQRTFDNGSIPHQIHLQEMHAILRRQGDYYPFLKENQDRIEKILTFRIPYYVGPLARKDSRFSWAEYHSDEKITPWNFDKVIDKEKSAEKFITRMTLNDLYLPEEKVLPKHSHVYETYAVYNELTKIKYVNEQGKDSFFDSNMKQEIFDHVFKENRKVTKEKLLNYLNKEFPEYRIKDLIGLDKENKSFNASLGTYHDLKKILDKAFLDDKVNEEVIEDIIKTLTLFEDKDMIHERLQKYSDIFTADQLKKLERRHYTGWGRLSYKLINGIRNKENNKTILDYLIDDGSANRNFMQLINDDTLPFKQIIQKSQVVGDVDDIEAVVHDLPGSPAIKKGILQSVKIVDELVKVMGDNPDNIVIEMARENQTTNRGRSQSQQRLKKLQNSLKELGSNILNEEKPSYIEDKVENSHLQNDQLFLYYIQNGKDMYTGDELDIDHLSDYDIDHIIPQAFIKDDSIDNRVLTSSAKNRGKSDDVPSLDIVRARKAEWVRLYKSGLISKRKFDNLTKAERGGLTEADKAGFIKRQLVETRQITKHVAQILDARFNTESDENDKVIRDVKVITLKSNLVSQFRKDFEFYKVREINDYHHAHDAYLNAVVGTALLKKYPKLASEFVYGEYKKYDIRKFITNSSDKATAKYFFYSNLMNFFKRVIRYSNGKVIVRPVVEYSKDTEDIAWDKKSNFRTICKVLSYPQVNIVKKVETQTGGFSKESILPKGDSDKLIPRKTKKAYWDTKKYGGFDSPTVAYSVFVVADVEKGKAKKLKTVKELVGISIMERSFFEENPVEFLENKGYHNIREDKLIKLPKYSLFEFEGGKRRLLASASELQKGNEMVIPGHLVKLLYHAQRINSFNSTKYLDYVSAHKKEFEKVLSCVEDFANLYVDVEKNLSKIRAVADSMDNFSIEEISNSFINLLTLTALGAPADFNFLGEKIPRKRYTSTKECLNATLIHQSITGLYETRIDLSKIGEE

SEQ ID NO: 89 - protein, 1345 aa, Streptococcus mutans; identical to SEQ ID NO: 39

SEQ ID NO: 90 - protein, 1326 aa, Streptococcus pseudoporcinus
MLGTVLFDSGETAQARRLKRTNRRRYTRRRYRLCQLQNIFATEMVKVDDTFFQRLSESFFYYQDKAFDKHPIFGNSKEERAYHKTYPTIYHLRKDLADRDQKADLRLIYLALSHIIKFRGHFLIEGKLNSENTDVQKLFIALVTVYNLLFEEEPIAGETCDAKALLTAKTSKSKRLESLISEFPGQKKNGLFGNLLALALGLRPNFKSNFGLSEDAKLQITKDTYEEELDNLLAEIGDHYADLFLAAKNLSDAILLSDILTLSDENTRAPLSASMIKRYEEHQEDLALLKKLVKEQMPEKYWEIFSNAKKNGYAGYIEGKVSQEDFYRYIKPILSRLKGGDEFLAKIDRDDFLRKQRTFDNGSIPHQIHLKELHAILRRQEKYYPFLAEQKEKIEQLLCFRIPYYVGPLAKGGNSSFAWLKRRSDEPITPWNFKDVVDEEASAQAFIEGMTNYDTYLPEEKVLPKHSPLYEMFTVYNELTKVKYIAENMTKPLYLSAEQKEAIIDHLFKQTRKVTVKDLKEKYFSQIEGLENVDVTGVEGAFNASLGTYNDLLKIIKDKAFLDDEANAEILEEIVLILTLFQDEKLIEKRLAKYANLFEKSVLKKLRKRHYRGWGRLSRQLIDGMKDKASGKTILDFLKADDFANRNFIQLINDSSLDFEKLIDDAQKKAIKRESLTEAVANLAGSPAIKKGILQSLKVVDEIVKVMGHNPDNIVIEMSRENQTTAQGLKNARQRLKKIKEVHKKTGSRILEDNSERITNLTLQDNRLYLYLLQDGKDMYTGQDLDINNLSQYDIDHIIPQSFIKDNSIDNLVLTTQKANRGKSDNVPSIEVVRDMKDRVWRRQLANGAISRQKFDHLTKAERGGLADSDKARFLRRQLVETRQITKHVAQLLDSRFNSKSNQNKKLARNVKIITLKSKIVSDFRKDFGLYKLREVNNYHHAHDAYLNAVVGTALLKKYPKLEAEFVYGDYKHFDLVKLISKSDPSLGKATAKVFFYSNIMNFFKEELSLADGTLMKRPVIETNTETGEVVWDKVKDFKTIRKVLSYPQVNIVKKTEIQSGAFSKESVLSKGNSDKLIERKKGWDPKKYGGFDSPNTAYSIFVVAKVAKRKAQKLKTVKEIVGITIMEQAEYEKDNIAFLEKKGYQDIQEKLLIKLPKYSLFELENGRRRLLASANEFQKGNELALSGKYMKFLYLASRYDKLSSKIESEQQKKLFVEQHLHYFDEILDIVVKHATCYIKAENNLKKIISLYKKKEAYSINEQALNMLNLFIFTSLGAPSTFVFFDETIDRKRYTTSSDVLNGILIQQSITGLYETRIDLSRFGGD

SEQ ID NO: 91 - protein, 1345 aa, Streptococcus mutans
MKKPYSIGLDIGTNSVGWAVVTDDYKVPAKKMKVLGNTDKSHIKKNLLGALLFDSGNTAEDRRLKRTARRRYTRRRNRILYLQEIFSEEMGKVDDSFFHRLEDSFLVTEDKRGERHPIFGNLEEEVKYHENFPTIYHLRQYLADNPEKTDLRLVYLALAHIIKFRGHFLIEGKFDTRNNDVQRLFQEFLAVYDNTFENSSLQEQNVQVEEILTDKISKSAKKDRVLKLFPNEKSNGRFAEFLKLIVGNQADFKKHFELEEKAPLQFSKDIYEEELEVLLAQIGDNYAELFLSAKKLYDSILLSGILTVTDVSTKAPLSASMIQRYNEHQMDLAQLKQFIRQKLSDKYNEVFSDVSKDGYAGYIDGKTNQEAFYKYLKGLLNKIEGSGYFLDKIEREDFLRKQRTFDNGSIPHQIHLQEMRAIIRRQAEFYPFLADNQDRIEKILTFRIPYYVGPLARGKSDFAWLSRKSADKITPWNFDEIVDKESSVEAFINRMTNYDLYLPNQKVLPKHSLLYEKFTVYNELTKVKYKTEQGKTAFFDANMKQEIFDGVFKVYRKVTKDKLMDFLEKEFDEFRIVDLTGLDKENKAFNASYGTYHDLRKILDKDFLDNSKNEKILEDIVLTLTLFEDREMIRKRLKNYSDLLTKEQLKKLERRHYTGWGRLSAELIHGIRNKESRKTILDYLIDDGNSNRNFMQLINDDALSFKEEIAKAQVIGETDNLNQVVSDIAGSPAIKKGILQSLKIVDELVKIMGHQPENIVVEMARENQFTNQGRRNSQQRLKGLTDSIKEFGSQILKEHPVENSQLQNDRLFLYYLQNGRDMYTGEELDIDYLSQYDIDHIIPQAFIKDNSIDNRVLTSSKENRGKSDDVPSKDVVRKMKSYWSKLLSAKLITQRKFDNLTKAERGGLTDDDKAGFIKRQLVETRQITKHVARILDERFNTETDENNKKIRQVKIVTLKSNLVSNFRKEFELYKVREINDYHHAHDAYLNAVIGKALLGVYPQLEPEFVYGDYPHFHGHKENKATAKKFFYSNIMNFFKKDDVRTDKNGEIIWKKDEHISNIKKVLSYPQVNIVKKVEEQTGGFSKESILPKGNSDKLIPRKTKKFYWDTKKYGGFDSPIVAYSILVIADIEKGKSKKLKTVKALVGVTIMEKMTFERDPVAFLERKGYRNVQEENIIKLPKYSLFKLENGRKRLLASARELQKGNEIVLPNHLGTLLYHAKNIHKVDEPKHLDYVDKHKDEFKELLDVVSNFSKKYTLAEGNLEKIKELYAQNNGEDLKELASSFINLLTFTAIGAPATFKFFDKNIDRKRYTSTTEILNATLIHQSITGLYETRIDLNKLGGD

SEQ ID NO: 92 - protein, 1345 aa, Streptococcus mutans
MKKPYSIGLDIGTNSVGWAVVTDDYKVPAKKMKVLGNTDKSHIKKNLLGALLFDSGNTAEDRRLKRTTRRRYTRRRNRILYLQEIFSEEMGKVDDSFFHRLEDSFLVTEDKRGERHPIFGNLEEEVKYHENFPTIYHLRQYLADNPEKTDLRLVYLALAHIIKFRGHFLIEGKFDTRNNDVQRLFQEFLAVYDNTFENSSLQEQNVQVEEILTDKISKSAKKDRVLKLFPNEKSNGCFAEFLKLIVGNQADFKKHFELEEKAPLQFSKDTYEEELEVLLAQIGDNYAELFLSAKKLYDSILLSGILTVTDVSTKAPLSASMIQRYNEHQMDLTQLKQFIRQKLSDKYNEVFSDVSKDGYAGYIDGKTNQEAFYKYLKGLLNKIEGSGYFLDKIEREDFLRKQRTFDNGSIPHQIHLQEMRAIIRRQAEFYPFLADNQDRIEKLLTFRIPYYVGPLASGKSDFAWLSRKSADKITPWNFDEIVDKESSAEAFINRMTNYDLYLPNQKVLPKHSLLYEKFTVYNELTKVKYKTEQGKTAFFDANMKQEIFDGVFKVYRKVTKDKLMDFLEKEFDEFRIVDLTGLDKENKVFNASYGTYHDLCKILDKDFLDNSKNEKILEDIVLTLTLFEDREMIRKRLENYSDLLTKEQVKKLERRHYTGWGRLSAELIHGIRNKESRKTILDYLIDDGNSNRNFMQLINDDALSFKEEIAKAQVIGETDNLNQVVSDIAGSPAIKKGILQSLKIVDELVKIMGHQPENIVVEMARENQFTNQGRRNSQQRLKGLTDSIKEFGSQILKEHPVENSQLQNDRLFLYYLQNGRDMYTGEELDIDYLSQYDIDHIIPQAFIKDNSIDNRVLTSSKENRGKSDDVPSKDVVRKMKSYWSKLLSAKLITQRKFDNLTKAERGGLTDDDKAGFIKRQLVETRQITKHVARILDERFNTETDENNKKIRQVKIVTLKSNLVSNFRKEFELYKVREINDYHHAHDAYLNAVIGKALLGVYPQLEPEFVYGDYPHFHGHKENKATAKKFFYSNIMNFFKKDDVRTDKNGEIIWKKDEHISNIKKVLSYPQVNIVKKVEEQTGGFSKESILPKGNSDKLIPRKTKKFYWDTKKYGGFDSPIVAYSILVIADIEKGKSKKLKTVKALVGVTIMEKMTFERDPVAFLERKGYRNVQEENIIKLPKYSLFKLENGRKRLLASARELQKGNEIVLPNHLGTLLYHAKNIHKVDEPKHLDYVDKHKDEFKELLDVVSNFSKKYTLAEGNLEKIKELYAQNNGEDLKELASSFINLLTFTAIGAPATFKFFDKNIDRKRYTSTTEILNATLIHQSITGLYETRIDLSKLGGD

SEQ ID NO: 93 - protein, 1345 aa, Streptococcus mutans; identical to SEQ ID NO: 36

SEQ ID NO: 94 - protein, 1345 aa, Streptococcus mutans
MKKPYSIGLDIGTNSVGWAVVTDDYKVPAKKMKVLGNTDKSHIKKNLLGALLFDSGNTAADRRLKRTARRRYTRRRNRILYLQEIFAEEMSKVDDSFFHRLEDSFLVTEDKRGERHPIFGNLEEEVKYHENFPTIYHLRQYLADNPEKVDLRLVYLALAHIIKFRGHFLIEGKFDTRNNDVQRLFQEFLAVYDNTFENSSLQEQNVQVEEILTDKISKSAKKDRVLKLFPNEKSNGRFAEFLKLIVGNQADFKKHFELEEKAPLQFSKDTYEEELEVLLAQIGDNYAELFLSAKKLYDSILLSGILTVTDVSTKAPLSASMIQRYNEHQMDLAQLKQFIRQKLSDKYNEVFSDVSKDGYAGYIDGKTNQEAFYKYLKGLLNKIEGSGYFLDKIEREDFLRKQRTFDNGSIPHQIHLQEMRAIIRRQAEFYPFLADNQDRIEKILTFRIPYYVGPLARGKSDFAWLSRKSADKITPWNFDEIVDKESSAEAFINRMTNYDLYLPNQKVLPKHSLLYEKFTVYNELTKVKYKTEQGKTAFFDANMKQEIFDGVFKVYRKVTKDKLMDFLEKEFDEFRIVDLTGLDKENKAFNASYGTYHDLRKILDKDFLDNSKNEKILEDIVLTLTLFEDREMIRKRLENYSDLLTKEQVKKLERRHYTGWGRLSAELIHGIRNKESRKTILDYLIDDGNSNRNFMQLINDDALSFKEEIAKAQVIGETDNLNQVVSDIAGSPAIKKGILQSLKIVDELVKIMGHQPENIVVEMARENQFTNQGRRNSQQRLKGLTDSIKEFGSQILKEHPVENSQLQNDRLFLYYLQNGRDMYTGEELDIDYLSQYDIDHIIPQAFIKDNSIDNRVLTSSKENRGKSDDVPSKNVVRKMKSYWSKLLSAKLITQRKFDNLTKAERGGLTDDDKAGFIKRQLVETRQITKHVARILDERFHTETDENNKKIRQVKIVTLKSNLVSNFRKEFELYKVREINDYHHAHDAYLNAVIGKALLGVYPQLEPEFVYGDYPHFHGHKENKATAKKFFYSNIMNFFKKDDVRTDKNGEIIWKKDEHISNIKKVLSYPQVNIVKKVEEQTGGFSKESILPKGNSDKLIPRKTKKFYWDTKKYGGFDSPIVAYSILVIADIEKGKSKKLKTVKALVGVTIMEKMTFERDPVAFLERKGYRNVQEENIIKLPKYSLFKLENGRKRLLASARELQKGNEIVLPNHLGTLLYHAKNIHKVDEPKHLDYVDKHKDEFKELLDVVSNFSKKYTLAEGNLEKIKELYAQNNGEDLKELSSSFINLLTFTAIGAPAAFKFFDKNIDRKRYTSTTEILNATLIHQSITGLYETRIDLSKLGGD

SEQ ID NO: 95 - protein, 1377 aa, Streptococcus equinus
MEKTYSIGLDIGTNSVGWAVITDDYKVPAKKMKVLGNTDKKYIKKNLLGALLFDSGETAEATRLKRAARRRYTRRKNRLRYLQEIFAKEMAKVDESFFQRLEESFLTDDDKTFDSHPIFGNKAEEDTYHQEFPTIYHLRKHLADSPEKVDLRLVYLALAHMIKFRGHFLIEGQLNAENTDVQKIFADFVGVYDRTFDDSHLSEITVDAASILTEKISKSRRLENLIKQYPTEKKNTLFGNLVALALGLQPNFKTNFKLSEDAKLQFSKDTYDEDLEELLGKIGDDYADLFTAAKNLYDAILLSGILTVDDNSTKAPLSASMIKRYEEHHEDLEKLKTFIKVNNFDKYHEIFKDKSKNGYAGYIENGVKQDIFYKHLKSIISEKNGGQYFLDKIEREDFLRKQRTFDNGSIPYQIHLQEMRTILRRQGEYYPFLKENQAKIEKILTFRIPYYVGPLARKNSRFAWAKYHSDEPITPWNFDEVVDKEKSAEKFITRMTLNDLYLPEEKVLPKHSYVYETFAVYNELTKIKYVNEQGKSFFFDANMKQEIFDHVFKENRKVTKAKLLSYLNNEFEEFRINDLIGLDKDSKSFNASLGTYHDLKKILDKSFLDDKTNEQIIEDIVLTLTLFEDRDMIHERLQKYSDIFTSQQLKKLERRHYTGWGRLSYKLINGIRNKENNKTILDFLIDDGDANRNFMQLINDDSLSFKTTIQEAQVVGDVDDIEAVVHDLPGSPAIKKGILQSVKIVDELVKVMGHNPQNIVIEMARENQITGYGRNRSNQRLKRLQDSLKEFGSDILSKKKPSYVDSKVENSHLQNDRLFLYYIQNGKDMYTGEELDIDHLSDYDIDHIIPQAFIKDNSIDNRVLTSSAKNRGKSDDVPSIEIVRNRKSYWYKLYKSGLISKRKFDNLTKAERGGLTETDKAGFIKRQLVETRQITKHVAQILDARFNTKCDENDKVIRDVKVITLKSSLVSQFRKEFKFYKVREINDYHHAHDAYLNAVVGTALLKKYPKLAPEFVYGEYKKYDVRKLVAKSSDNHSELGKATAKYFFYSNLMNFFKTEVKYADGRVFERPDIETNADGEVVWNKQRDFNIVRKVLSYPQVNIVKKVEVQTGGFSKESILPKGDSDKLIPRKTKKLQWETQKYGGFDSPTVAYSVLVVADVEKGKTRKLKTVKELVGISIMERSSFEENPVSFLEKKGYHNVQEDKLIKLPKYSLFEFEGGRRRLLASATELQKGNEVVLPQYMVNLLYHSQHVNNSHKPEHLNYVKQHKDEFKDIFNLIISIARINILKPKVVDNLINEFTEYGQEDISSLSESFINLLKFISFGAPGAFKFLKLDVKQSNLRYKSTTEALSATLIHQSVTGLYETRIDLSKLGEE

SEQ ID NO: 96 - protein, 1345 aa, Streptococcus mutans; identical to SEQ ID NO: 11

SEQ ID NO: 97 - protein, 1373 aa, Streptococcus oralis
MENKNYSIGLDIGTNSVGWAVITDDYKVPSKKMKVLGNTDKRFIKKNLIGALLFDEGTTAEARRLKRTARRRYTRRKNRLRYLQEIFAEEMSKVDSSFFHRLDDSFLIPEDKKGSKYPIFATLIEEKEYHKQFPTIYHLRKQLADSKEKTDLRLIYLALAHMIKYRGHFLYEDTFDIKNNDIQKIFNEFISIYNNTFEGNSLSGQNVQVEAIFTDKISKSAKRERVLKLFPDEKSTGLFSEFLKLIVGNQADFKKHFDLEEKAPLQFSRDTYDEDLENLLGQIGDDFADLFVAAKKLYDAILLSGILTVTDPSTKAPLSASMIERYENHQKDLATLKQFIKTNLPEKYDEVFSDQSKDGYAGYIDGKTTQESFYKYIKNLLSKFEGADYFLEKIEREDFLRKQRTFDNGSIPHQIHLQEMNAILRRQGEHYPFLKENKEKIEKILTFRIPYYVGPLARGNRDFAWLTRNSDQAIRPWNFEEIVDKASSAESFINKMTNYDLYLPEEKVLPKHSLLYETFAVYNELTKVKFIAEGLRDYQFLDSRQKKDIFYTLFKAEDKRKVTEKDIIQYLHTVDGYDGIELKGIEKQFNASLSTYHDLLKIIKDKEFMDDPNNEEILENIVHTLTIFEDREMIKQRLAQYDSLFDEKVIKALTRRHYTGWGKLSSKLINGIRDKQTGKTILDYLMDDGYNNRNFMQLINDDELSFKEIIKKAQVVGKTDDVKQVVQELPGSPAIKKGILQSIKLVDELVKVMGHEPESIVIEMARENQTTARGKKNSQQRYKRIEDSLKILASGLNAKILKEHPTDNIQLQNDRLFLYYLQNGRDMYTGKPLDINQLSSYDIDHIVPQAFIKDDSLDNRVLTSLKDNRGKSDNVPSLEVVEKMKTFWQQLLDSKLISYRKFNNLTKAERGGLDERDKVGFIKRQLVETRQITKHVAQILDARYNTEVNEKDKKNRTVKIITLKSNLVSNFRKEFRLYKIREINDYHHAHDAYLNAVVAKAILKKYPKLEPEFVYGDYQKYDLKRYISRSKDPKEIEKATEKYFFYSNLLNFFKEEVHYADGTIVKRENIEYSKDTGEIAWNKEKDFATIKKVLSLPQVNIVKKREVQTGGFSKESILPKGNSDKLIPRKTKDILWDTTKYGGFDSPVIAYSILLIADIEKGKAKRLKTVKTLVGITIMEKATFEKSPIAFLENKGYHNVRKENILCLPKYSLFELKNGRRRMLASAKELQKGNEIVLPVHLTTLLYHAKNIHRLDEPEHLEYIQKHRNEFKGLLNLVSEFSQKYVLADANLEKIKNLYADNEQADIEILANSFINLLTFTALGAPAAFKFFGKDVDRKRYTTVSEILNATLIHQSITGLYETRIDLSKLGED

SEQ ID NO: 98 - protein, 1355 aa, Streptococcus mutans
MKKSYSIGLDIGTNSVGWAVVTDDYKVPAKKMKVLGNTDKSHIKKNLLGALLFDSGNTAEDRRLKRTARRRYTRRRNRILYLQEIFSEEMGKVDDSFFHRLDESFLTDDDKNFDSHPIFGNKAEEDAYHQKFPTIYHLRKHLADSTEKADLRLVYLALAHMIKFRGHFLIEGELNAENTDVQKLFADFVGVYDRTFDDSHLSEITVDASSILTEKISKSRRLEKLINNYPKEKKNTLFGNLIALSLGLQPNFKTNFKLSEDAKLQFSKDTYEEDLEELLGKIGDDYADLFTLAKNLYDAILLSGILTADDSSTKAPLSASMIKRYAEHHEDLEKLKEFIKANKPELYHDIFKDETKNGYAGYIENGVKQDEFYKYLKNTLSKIAGSDYFLDKIEREDFLRKQRTFDNGSIPHQIHLQEMHAILRRQGDYYPFLKENQDRIEKILTFRIPYYVGPLARKNSRFAWAEYHSDEAVMPWNFDQVIDKESSAQAFIEHMTNNDLYLPNEKVLPKHSPLYEKYTVYNELTKIKYVTEIGEAKFFDANLKQEIFDGLFKHERKVTKKKLRTFLDKNFDEFRIVDIQGLDKETETFNASYATYQDLLKVIKDKVFMDNPENAEILENIVLTLTLFEDREMIKQRLAKYADVFDKKVIDQLARRHYTGWGRLSAKLLNGIRDKQSCKTIMDYLIDDAQSNRNLMQLITDDNLTFKDDIVKAQYVDNSDDLHQVVQSLAGSPAIKKGILQSLKIVDELVKVMGKEPEQIVVEMARENQTTAKGRRNSQQRYKRLKEAIKSLDRDLNHKILKEHPTDNQALQNNRLFLYYLQNGRDMYTGESLDINRLSDYDIDHVIPQAFIKDNSIDNRVLTSSKANRGKSDDVPSEDVVNRMRPFWNKLLSSGLISQRKYNNLTKKELTPDDKAGFIKRQLVETRQITKHVARMLDERFNKEFDDNNKRIRRVKIVTLKSNLVSSFRKEFELYKVREINDYHHAHDAYLNAVVVKALLVKYPKLEPEFVYGEYPKYNSYRERKTATQKMFFYSNIMNMFKSKVKLADDQIVERPMIEVNDETGEIAWDKTKHITTVKKVLSYPQVNIVKKVEEQTIGQNGGLFDDNPKSPLEVIPSKLVPLKKALNPEKYGGYQKPTTAYPILLIVDTKQLIPISVMDKKRFEQNPVKFLKDKGYQQIEKNNFVKLPKYTLVDIGNGIKRLWASSKEVHKGNQLVVSKKSQDLLYHAHHLDNDYSNEYVKNHYQQFDILFNEITSFSKKCKLGKEHIQKIEEAYSKERDSASIEELADGFIKLLGFTQLGATSPFSFLGIKLNQKQYTGKKDYLLPCMEATLIHQSITGLYETRIDLNKLGGD

SEQ ID NO: 99 - protein, 773 aa, Streptococcus agalactiae
MNKPYSIGLDIGTNSVGWSIITDDYKVPAKKMRVLGNTDKEYIKKNLIGALLFDGGNTAADRRLKRTARRRYTRRRNRILYLQEIFAEEMSKVDDSFFHRLEDSFLVEEDKRGSKYPIFATLQEEKDYHEKFSTIYHLRKELADKKEKADLRLIYIALAHIIKFRGHFLIEDDSFDVRNTDISKQYQDFLEIFNTTFENNDLLSQNVDVEAILTDKISKSAKKDRILAQYPNQKSTGIFAEFLKLIVGNQADFKKYFNLEDKTPLQFAKDSYDEDLENLLGQIGDEFADLFSAAKKLYDSVLLSGILTVIDLSTKAPLSASMIQRYDEHREDLKQLKQFVKASLPEKYQEIFADSSKDGYAGYIEGKTNQEAFYKYLSKLLTKQEDSENFLEKIKNEDFLRKQRTFDNGSIPHQVHLTELKAIIRRQSEYYPFLKENQDRIEKILTFRIPYYIGPLAREKSDFAWMTRKTDDSIRPWNFEDLVDKEKSAEAFIHRMTNNDFYLPEEKVLPKHSLIYEKFTVYNELTKVRYKNEQGETYFFDSNIKQEIFDGVFKEHRKVSKKKLLDFLAKEYEEFRIVDVIGLDKENKAFNASLGTYHDLEKILDKDFLDNPDNESILEDIVQTLTLFEDREMIKKRLENYKDLFTESQLKKLYRRHYTGWGRLSAKLINGIRDKESQKTILDYLIDDGRSNRNFMQLINDDGLSFKSIISKAQAGSHSDNLKEVVGELAGSPAIKKGILQSLKIVDELVKVMGYEPEQIVVEMARENQTTNQ

SEQ ID NO: 100 - protein, 1345 aa, Streptococcus mutans
MKKPYSIGLDIGTNSVGWAVVTDDYKVPAKKMKVLGNTDKSHIKKNLLGALLFDSGNTAEDRRLKRTARRRYTRRRNRILYLQEIFSEEMGKVNDSFFHRLEDSFLVTEDKRGERHPIFGNLEEEVKYHENFPTIYHLRQYLADNPEKVDLRLVYLALAHIIKFRGHFLIEGKFDTRNNDVQRLFQEFLAVYDNTFENSSLQEQNVQVEEILTDKISKSAKKDRVLKLFPNEKSNGRFAEFLKLIVGNQADFKKHFELEEKAPLQFSKDTYEEELEVLLAQIGDNYAELFLSAKKLYDSILLSGILTVTDVSTKAPLSASMIQRYNEHQMDLAQLKQFIRQKLSDKYNEVFSDVSKDGYAGYIDGKTNQEAFYKYLKGLLNKIEGSGYFLDKIEREDFLRKQRTFDNGSIPHQIHLQEMRAIIRRQAEFYPFLADNQDRIEKILTFRIPYYVGPLARGKSDFAWLSRKSADKITPWNFDEIVDKESSAEAFINRMTNYDLYLPNQKVLPKHSLLYEKFTVYNELTKVKYKTEQGKTAFFDANMKQEIFDGVFKVYRKVTKDKLMDFLEKEFDEFRIVDLTGLDKENKVFNASYGTYHDLCKILDKDFLDNSKNEKILEDIVLTLTLFEDREMIRKRLENYSDLLTKEQVKKLERRHYTGWGRLSAELIHGIRNKESRKTILDYLIDDGNSNRNFMQLINDDALSFKEEIAKAQVIGETDNLNQVVSDIAGSPAIKKGILQSLKIVDELVKIMGHQPENIVVEMARENQFTKQGRRNSQQRLKGLTDSIKEFGSQILKEHPVENSQLQNDRLFLYYLQNGRDMYTGEELDIDYLSQYDIDHIIPQAFIKDNSIDNRVLTSSKENRGKSDDVPSKDVVRKMKSYWSKLLSAKLITQRKFDNLTKAERGGLTDDDKAGFIKRQLVETRQITKHVARILDERFYTETDENNKKIRQVKIVTLKSNLVSNFRKEFELYKVREINDYHHAHDAYLNAVIGKALLGVYPQLEPEFVYGDYPHFHGHKENKATAKKFFYSNIMNFFKKDDVRTDKNGEIIWKKDEYISNIKKVLSYPQVNIVKKVEEQTGGFSKESILPKGNSDKLIPRKTKKFYWDTKKYGGFDSPIVAYSILVIADIEKGKSKKLKTVKALVGVTIMEKMTFERDPIAFLERKGYRNVQEENIIKLPKYSLFKLENGRKRLLASARELQKGNEIVLPNHLGTLLYHAKNIHKVDEPKHLDYVDKHKDEFKELLDVVSNFSKKYTLAEGNLEKIKELYAQNNGEDLKELASSFINLLTFTAIGAPAAFKFFDKNIDRKRYTSTTEILNATLIHQSITGLYETRIDLSKLGGD

SEQ ID NO: 101 - protein, 1345 aa, Streptococcus anginosus
MDQKYSIGLDIGTNSVGWAVVTDDYKVPAKKMKVLGNTDKQSIKKNLLGALLFDSGETAEATRLKRTARRRYTRRRNRLRYLQEIFAEEMNKVDENFFQRLDDSFLVDEDKRGERHPIFGNIAAEVKYHDDFPTIYHLRKHLADISQKADLRLVYLALAHMIKFRGHFLIEGQLKAENTNVQALFKDFVEVYDKTVEESHLSEMTVDALSILTEKVSKSRRLENLIAHYPAEKKNTLFGNLIALSLGLQPNFKTNFQLSEDAKLQFSKDTYEEDLEGLLGEIGDEYADLFASAKNLYDAILLSGILTVDDNSTKAPLSASMVKRYEEHQKDLKKLKDFIKVNAPDQYNAIFKDKNKKGYAGYIENGVKQDEFYKYLKGILLQINGSGDFLDKIDREDFLRKQRTFDNGSIPHQIHLQEMHAILRRQEEHYPFLKENQDKIEKILTFRIPYYVGPLARKGSRFAWAEYKADEKITPWNFDDILDKEKSAEKFITRMTLNDLYLPEEKVLPKHSLLYETFTVYNELTKVKYVNEQGEAKFFDANMKQEIFDHVFKENRKVTKDKLLNYLNKEFEEFRIVNLTGLDKENKAFNSSLGTYHDLRKILDKSFLDDKANEKTIEDIIQTLTLFEDREMIRQRLQKYSDIFTKAQLKKLERRHYTGWGRLSYKLINGIRNKENKKTILDYLIDDGYANRNFMQLINDDALSFKEEIARAQIIGDVDDIANVVHDLPGSPAIKKGILQSVKIVDELVKVMGHNPANIIIEMARENQMTDKGRRNSQQRLKLLQDSLKNLDNPVNIKNVENQQLQNDRLFLYYIQNGKDMYTGETLDINNLSQYDIDHIIPQAFIKDNSLDNRVLTRSDKNRGKSDDVPSIEVVHEMKSFWSKLLSVKLITQRKFDNLTKAERGGLTEEDKAGFIKRQLVETRQITKHVAQILDERFNTEFDGNKRRIRNVKIITLKSNLVSNFRKEFELYKVREINDYHHAHDAYLNAVVGNALLLKYPQLEPEFVYGEYPKYNSYRSRKSATEKFLFYSNILRFFKKEDIQTNEDGEIAWNKEKHIKILRKVLSYPQVNIVKKTEEQTGGFSKESILPKGESDKLIPRKTKNSYWNPKKYGGFDSPVVAYSILVFADVEKGKSKKLRKVQDMVGITIMEKKRFEKHPVDFLEQRGYRNVRLEKIIKLPKYSLFELENKRRRLLASARELQKGNELVIPQRFTTLLYHSYQIEKNYEPEHREYVEKHKDEFKELLEYISVFSRKYVLADNNLTKIEMLFSKNKDAEVSSLAKSFISLLTFTAFGAPAAFNFFGENIDRKRYTSVTECLNATLIHQSITGLYETRIDLSKLGED

SEQ ID NO: 102 - protein, 1338 aa, Streptococcus macacae
MTKPYSIGLDIGTNSVGWAVVTDGYKVPAKKMKVLGNTDKSHIKKNLLGALLFDSGNTAKDRRLKRTARRRYTRRRNRILYLQEIFAEEMAKADESFFQRLNESFLTNDDKEFDSHPIFGNKAEEEAHHHKFPTIFHLRKHLADSTEKSDLRLIYLALAHMIKFRGHFLIEGQLKAENTNVQTLFDDFVEVYDKTVEESHLSEISVSSILTEKISKSRRLENLIKYYPTEKKNTLFGNLIALSLGLQPNFKTNFKLSEDAKLQFSKDTYEEDLGELLGKIGDNYADLFISAKNLYDAILLSGILTIDDNTTKAPLSASMIKRYEEHQEDLAQLKKFIRQNLPDQYSEVFSDKTKDGYAGYIDGKTNQEAFYKYIKNMLSKTEGADYFLDKIDREDFLRKQRTFDNGSVPHQIHLQEMHAILRRQGEYYPFLKENQDKIEKILTFRIPYYVGPLARKGSRFAWAEYKADKKVTPWNFDDILDKEKSAEEFITRMTLNDLYLPEEKVLPKHSLVYETFNVYNELTKVKYVNEQGKAIFFDANMKQEIFDHVFKENRKVTKDKLLNYLNKEFEEFRIVNLTGLDKENKAFNSSLGTYHDLRKILDKSFLDDKVNEKIIEDIIQTLTLFEDREMIRQRLQKYSDIFTTQQLKKLERRHYTGWGRLSAKLINGIRDKQSNKTILGYLIDDGYSNRNFMQLINDDSLPFKEEIARAQVIGETDDLNQLVSDIAGSPAIKKGILQSLKIVDELVKVMGHNPANIVIEMARENQTTAKGRRSSQQRYKRLEEAIKNLDHDLNHKILKEHPTDNQALQNDRLFLYYLQNGRDMYTEDPLDINRLSDYDIDHIIPQSFIKDDSIDNKVLVSSAKNRGKSDNVPSEDVVNRMRPFWNKLLSCGLISQRKYSNLTKKELKPDDKAGFIKRQLVETRQITKHVAQILDARFNTKRDENKKVIRDVKIITLKSNLVSQFRKDFKFYKVREINDYHHAHDAYLNAVIGKALLDVYPQLEPEFVYGEYPHFHGYKENKATAKKFFYSNIMNFFKKDDIRTDENGEIVWKKDEHISNIKRVLSYPQVNIVKKVEIQTVGQNGGLFDDNPKSPLEVTPSKLVPLKKELNPKKYGGYQKPTTAYPVLLITDTKQLIPISVMNKKQFEQNPVKFLRDRGYQQVGKNDFIKLPKYTLVDIGDGIKRLWASSKEIHKGNQLVVSKKSQILLYHAHHLDSDLSNDYLQNHNQQFDVLFNEIISFSKKCKLGKEHIQKIENVYSNKKNSASIEELAESFIKLLGFTQLGATSPFNFLGVKLNQKQYKGKKDYILPCTEGTLIRQSITGLYETRVDLSKIGED

SEQ ID NO: 103 - protein, 1371 aa, Streptococcus sp.
MENKNYSIGLDIGTNSVGWSVITDDYKVPSKKMKVLGNTDKHFIKKNLIGALLFDEGTTAEARRLKRTARRRYTRRKNRLRYLQEIFSEEIGKVDSSFFHRLDDSFLIPEDKRGSKYPIFATLAEEKKYHKQFPTIYHLRKQLADSKEKTDLRLIYLALAHMIKYRGHFLYEEAFDIKNNDIQKIFNEFISIYNNTFEGNSLSGQNVQVEAIFTDKISKSAKRERVLKLFPDEKSTGLFSEFLKLIVGNQADFKKHFDLEEKAPLQFSRDTYDEDLENLLGQIGDDFADLFLVAKKLYDAILLSGILTVTNPSTKAPLSASMIERYENHQKDLASLKQFIKNNLPEKYDEVFSDQSEDGYAGYIDGKTTQETFYKYIKNLLSKFEGADYFLDKIEREDFLRKQRTFDNGSIPHQIHLQEMNAILRRQGEHYPFLKENKEKIEKILTFRIPYYVGPLARGNRDFAWLTRNSDQAIRPWNFEEIVDKASSAEDFINKMTNYDLYLPEEKVLPKHSLLYETFAVYNELTKVKFIAEGLRDYQFLDSGQKKQIVTQLFKEKRKVTEKDIIQFLHNVDGYDGIELKGIEKQFNASLSTYHDLLKIIKDKAFMDDAKNEAILENIVHTLTIFEDREMIKQRLAQYDSLFDEKVIKALTRRHYTGWGKLSAKLINGISDKQTGNTILDYLIDDGEINRNFMQLINDDGLSFKEIIQKAQVVGKTNDVKQVVQELPGSPAIKKGILQSIKIVDELVKVMGHAPESIVIEMARENQTTARGKKNSQQRYKRIEDSLKILASGLNSKILKEHPTDNIQLQNDRLFLYYLQNGKDMYTGEALDINQLSSCDIDHIIPQAFIKDDSLDNRVLTSSKDNRGKSDNVPSLEVVDKMKVFWQQLLDSKLISYRKFNNLTKAERGGLNELDKVGFIKRQLVETRQITKHVAQILDARFNKEVTEKDKKNRTVKIITLKSNLVSNFRKEFELYKVREINDYHHAHDAYLNAVVAKAILKKYPKLEPEFVYGDYQKYDLKRYISRSKDPKEIEKATEKYFFYSNLLNFFKEEVHYADGTIVKRENIEYSKDTGEIAWNKEKDFATIKKVLSLPQVNIVKKREVQTGGFSKESILPKGNSDKLIPRKTKDILWDTTKYGGFDSPVIAYSILLIADIEKGKAKKLKTVKTLVGITIMEKDAFEKNPIAFLENKGYHNVCKENILCLPKYSLFELENGRRRLLASAKELQKCNEIVLPVYLTTLLYHSKNVHKLDEPGHLEYIQKHRNEFKDLLNLVSEFSQKYVLADANLEKIKNLYADNEQADIEILANSFINLLTFTALGAPAAFKFFGKDVDRKRYTTVSEILNATLIHQSITGLYETRIDLSKLGED

SEQ ID NO: 104 - protein, 1345 aa, Streptococcus mutans
MKKPYSIGLDIGTNSVGWAVVTDDYKVPAKKMKVLGNTDKSHIKKNLLGALLFDSGNTAEDRRLKRTARRRYTRRRNRILYLQEIFSEEMGKVDDSFFHRLEDSFLVTEDKRGERHPIFGNLEEEVKYHENFPTIYHLRQYLADNPEKVDLRLVYLALAHIIKFRGHFLIEGKFDTRNNDVQRLFQEFLAVYDNTFENSSLQEQNVQVEEILTDKISKSAKKDRVLKLFPNEKSNGRFAEFLKLIVGNQADFKKHFELEEKAPLQFSKDTYEEELEVLLAQIGDNYAELFLSAKKLYDSILLSGILTVTDVSTKAPLSASMIQRYNEHQMDLAQLKQFIRQKLSDKYNEVFSDVSKDGYAGYIDGKTNQEAFYKYLKGLLNKIEGSGYFLDKIEREDFLRKQRTFDNGSIPHQIHLQEMRAIIRRQAEFYPFLADNQDRIEKILTFRIPYYVGPLARGKSDFAWLSRKSADKITPWNFDEIVDKESSAEAFINRMTNYDLYLPNQKVLPKHSLLYEKFTVYNELTKVKYKTEQGKTAFFDANMKQEIFDGVFKVYRKVTKDKLMDFLEKEFDEFRIVDLTGLDKENKVFNASYGTYHDLCKILDKDFLDNSKNEKILEDIVLTLTLFEDREMIRKRLENYSDLLTKEQVKKLERRHYTGWGRLSAELIHGIRNKESRKTILDYLIDDGNSNRNFMQLINDDALSFKEEIAKAQVIGETDNLNQVVSDIAGSPAIKKGILQSLKIVDELVKIMGHQPENIVVEMARENQFTNQGRQNSQQRLKGLTDSIKEFGSQILKEHPVENSQLQNDRLFLYYLQNGRDMYTGEELDIDYLSQYDIDHIIPQAFIKDNSIDNRVLTSSKENRGKSDDVPSEDVVRKMKSYWSKLLSAKLITQRKFDNLTKAERGGLTDDDKAGFIKRQLVETRQITKHVARILDERFYTETDENNKKIRQVKIVTLKSNLVSNFRKEFELYKVREINDYHHAHDAYLNAVIGKALLGVYPQLEPEFVYGDYPHFHGHKENKATAKKFFYSNIMNFFKKDDVRTDKNGEIIWKKDEHISNIKKVLSYPQVNIVKKVEEQTGGFSKESILPKGNSDKLIPRKTKKFYWDTKKYGGFDSPIVAYSILVIADIEKGKSKKLKTVKALVGVTIMEKMTFERDPVAFLERKGYRNVQEENIIKLPKYSLFKLENGRKRLLASARELQKGNEIVLPNHLGTLLYHAKNIHKVDEPKHLDYVDKHKDEFKELLDVVSNFSKKYTLAEGNLEKIKELYAQNNGEDLKELASSFINLLTFTAIGAPATFKFFDKNIDRKRYTSTTEILNATLIHQSITGLYETRIDLSKLGGD

SEQ ID NO: 105 - protein, 1367 aa, Streptococcus pyogenes; identical to SEQ ID NO: 18

SEQ ID NO: 106 - protein, 1350 aa, Streptococcus mutans
MKKPYSIGLDIGTNSVGWAVVTDDYKVPAKKMTVLGNTDKSHIKKNLLGALLFDSGNTAADRRLKRTARRRYTRRRNRILYLQEIFAEEMSKVDDSFFHRLEDSFLVTEDKRGERHPIFGNLEEEVKYHENFPTIYHLRQYLADNPEKVDLRLVYLALAHIIKFRGHFLIEGKFDTRNNDVQRLFQEFLAVYDNTFENSSLQEQNVQVEEILTDKISKSAKKDRVLKLFPNEKSNGRFAEFLKLIVGNQADFKKHFELEEKTPLQFSKDTYEEELEVLLAQIGDNYAELFLSAKKLYDSILLSGILTVTDVSTKAPLSASMIQRYNEHQMDLAQLKQFIRQKLSDKYNEVFSDVSKDGYAGYIDGKTNQEAFYKYLKGLLNKIEGSGYFLDKIEREDFLRKQRTFDNGSIPHQIHLQEMRAIIRRQAEFYPFLADNQDRIEKILTFRIPYYVGPLARGKSDFAWLSRKSADKITPWNFDEIVDKESSAEAFINRMTNYDLYLPNQKVLPKHSLLYEKFTVYNELTKVKYKTEQGKTAFFDANMKQEIFDGVFKVYRKVTKDKLMDFLEKEFDEFRIVDLTGLDKENKAFNASYGTYHDLRKILDKDFLDNSKNEKILEDIVLTLTLFEDREMIRKRLENYSDLLTKEQVKKLERRHYTGWGRLSAELIHGIRNKESRKTILDYLIDDGNSNRNFMQLINDDALSFKEEIAKAQVIGETDNLNQVVSDIAGSPAIKKGILQSLKIVDELVKIMGHQPENIVVEMARENQFTNQGRRNSQQRLKGLTDSIKEFGSQILKEHPVENSQLQNDRLFLYYLQNGRDMYTGEELDIDYLSQYDIDHIIPQAFIKDNSIDNRVLTSSKENRGKSDDVPSEDVVNRMRPFWNKLLSSGLISQRKYNNLTKKELTPDDKAGFIKRQLVETRQITKHVARMLDERFNKEFDDNNKRIRRVKIVTLKSNLVSSFRKEFELYKVREINDYHHAHDAYLNAVVVKALLVKYPKLEPEFVYGEYPKYNSYRERKTATQKMFFYSNIMNMFKSKVKLADDQIVERPMIEVNDETGEIAWDKTKHITTVKKVLSYPQVNIVKKVEEQTIGQNGGLFDDNPKSPLEVIPSKLVPLKKALNPEKYGGYQKPTTAYPILLIVDTKQLIPISVMDKKRFEQNPVKFLKDKGYQQIEKNNFVKLPKYTLVDIGNGIKRLWASSKEVHKGNQLVVSKKSQDLLYHAHHLDNDYSNEYVKNHYQQFDILFNEITSFSKKCKLGKEHIQKIEEAYSKERDSASIEELADGFIKLLGFTQLGATSPFSFLGIKLNQKQYTGKKDYLLPCMEATLIHQSITGLYETRIDLSKLGGD

SEQ ID NO: 107 - protein, 1388 aa, Streptococcus thermophilus
MTKPYSIGLDIGTNSVGWAVITDNYKVPSKKMKVLGNTSKKYIKKNLLGVLLFDSGITAEGRRLKRTARRRYTRRRNRILYLQEIFSTEMATLDDAFFQRLDDSFLVPDDKRDSKYPIFGNLVEEKAYHDEFPTIYHLRKYLADSTKKADLRLVYLALAHMIKYRGHFLIEGEFNSKNNDIQKNFQDFLDTYNAIFESDLSLENSKQLEEIVKDKISKLEKKDRILKLFPGEKNSGIFSEFLKLIVGNQADFRKCFNLDEKASLHFSKESYDEDLETLLGYIGDDYSDVFLKAKKLYDAILLSGFLTVTDNETEAPLSSAMIKRYNEHKEDLALLKEYIRNISLKTYNEVFKDDTKNGYAGYIDGKTNQEDFYVYLKNLLAEFEGADYFLEKIDREDFLRKQRTFDNGSIPYQIHLQEMRAILDKQAKFYPFLAKNKERIEKILTFRIPYYVGPLARGNSDFAWSIRKRNEKITPWNFEDVIDKESSAEAFINRMTSFDLYLPEEKVLPKHSLLYETFNVYNELTKVRFIAESMRDYQFLDSKQKKDIVRLYFKDKRKVTDKDIIEYLHAIYGYDGIELKGIEKQFNSSLSTYHDLLNIINDKEFLDDSSNEAIIEEIIHTLTIFEDREMIKQRLSKFENIFDKSVLKKLSRRHYTGWGKLSAKLINGIRDEKSGNTILDYLIDDGISNRNFMQLIHDDALSFKKKIQKAQIIGDEDKGNIKEVVKSLPGSPAIKKGILQSIKIVDELVKVMGGRKPESIVVEMARENQYTNQGKSNSQQRLKRLEKSLKELGSKILKENIPAKLSKIDNNALQNDRLYLYYLQNGKDMYTGDDLDIDRLSNYDIDHIIPQAFLKDNSIDNKVLVSSASNRGKSDDFPSLEVVKKRKTFWYQLLKSKLISQRKFDNLTKAERGGLLPEDKAGFIQRQLVETRQITKHVARLLDEKFNNKKDENNRAVRTVKIITLKSTLVSQFRKDFELYKVCEINDFHHAHDAYLNAVIASALLKKYPKLEPEFVYGDYPKYNSFRERKSATEKVYFYSNIMNIFKKSISLADGRVIERPLIEVNEETGESVWNKESDLATVRRVLSYPQVNVVKKVEEQNHGLDRGKPKGLFNANLSSKPKPNSNENLVGAKEYLDPKKYGGYAGISNSFAVLVKGTIEKGAKKKITNVLEFQGISILDRINYRKDKLNFLLEKGYKDIELIIELPKYSLFELSDGSRRMLASILSTNNKRGEIHKGNQIFLSQKFVKLLYHAKRISNTINENHRKYVENHKKEFEELFYYILEFNENYVGAKKNGKLLNSAFQSWQNHSIDELCSSFIGPTGSERKGLFELTSRGSAADFEFLGVKIPRYRDYTPSSLLKDATLIHQSVTGLYETRIDLAKLGEG

SEQ ID NO: 108 - protein, 1368 aa, Streptococcus pyogenes; identical to SEQ ID NO: 76

SEQ ID NO: 109 - protein, 1345 aa, Streptococcus mutans
MKKPYSIGLDIGTNSVGWAVVTDDYKVPAKKMKVLGNTDKSHIKKNLLGALLFDSGNTAADRRLKRTARRRYTRRRNRILYLQEIFAEEMSKVDDSFFHRLEDSFLVTEDKRGERHPIFGNLEEEVKYHENFPTIYHLRQYLADNPEKVDLRLVYLALAHIIKFRGHFLIEGKFDTRNNDVQRLFQEFLAVYDNTFENSSLQEQNVQVEEILTDKISKSAKKDRVLKLFPNEKSNGRFAEFLKLIVGNQADFKKHFELEEKAPLQFSKDTYEEELEVLLAQIGDNYAELFLSAKKLYDSILLSGILTVTDVSTKAPLSASMIQRYNEHQMDLAQLKQFIRQKLSDKYNEVFSDVSKDGYAGYIDGKTNQEAFYKYLKGLLNKIEGSGYFLDKIEREDFLRKQRTFDNGSIPHQIHLQEMRAIIRRQAEFYPFLADNQDRIEKILTFRIPYYVGPLARGKSDFAWLSRKSADKITPWNFDEIVDKESSAEAFINRMTNYDLYLPNQKVLPKHSLLYEKFTVYNELTKVKYKTEQGKTAFFDANMKQEIFDGVFKVYRKVTKDKLMDFLEKEFDEFRIVDLTGLDKENKAFNASYGTYHDLRKILDKDFLDNSKNEKILEDIVLTLTLFEDREMIRKRLENYSDLLTKEQVKKLERRHYTGWGRLSAELIHGIRNKESRKTILDYLIDDGNSNRNFMQLINDDALSFKEEIAKAQVIGETDNLNQVVSDIAGSPAIKKGILQSLKIVDELVKIMGHQPENIVVEMARENQFTNQGRRNSQQRLKGLTDSIKEFGSQILKEHPVKHSQLQNDRLFLYYLQNGRDMYTGEELDIDYLSQYDIDHIIPQAFIKDNSIDNRVLTSSKENRGKSDDVPSKNVVRKMKSYWSKLLSAKLITQRKFDNLTKAERGGLTDDDKAGFIKRQLVETRQITKHVARILDERFHTETDENNKKIRQVKIVTLKSNLVSNFRKEFELYKVREINDYHHAHDAYLNAVIGKALLGVYPQLEPEFVYGDYPHFHGHKENKATAKKFFYSNIMNFFKKDDVRTDKNGEIIWKKDEHISNIKKVLSYPQVNIVKKVEEQTGGFSKESILPKGNSDKLIPRKTKKFYWDTKKYGGFDSPIVAYSILVIADIEKGKSKKLKTVKALVGVTIMEKMTFERDPVAFLERKGYRNVQEENIIKLPKYSLFKLENGRKRLLASARELQKGNEIVLPNHLGTLLYHAKNIHKVDEPKHLDYVDKHKDEFKELLDVVSNFSKKYTLAEGNLEKIKELYAQNNGEDLKELASSFINLLTFTAIGAPATFKFFDKNIDRKRYTSTTEILNATLIHQSITGLYETRIDLSKLGGD

SEQ ID NO: 110 - protein, 1371 aa, Streptococcus dysgalactiae
MDKKYSIGLDIGTNSVGWAVITDDYKVPSKKFKVLGNTDRHSIKKNLIGALLFDSGETAEATRLKRTARRRYTRRKNRIRYLQEIFSSEMSKVDDSFFHRLEESFLVEEDKKHERHPIFGNIVDEVAYHEKYPTIYHLRKKLADSTDKADLRLIYLALAHMIKFRGHFLIEGDLNPDNSDMDKLFIQLVQTYNQLFEENPINASRVDAKAILSARLSKSRRLENLIAQLPGEKRNGLFGNLIALSLGLTPNFKSNFDLAEDAKLQLSKDTYDDDLDNLLAQIGDQYADLFLAAKNLSDAILLSDILRVNSEITKAPLSASMIKRYDEHHQDLTLLKALVRQQLPEKYKEIFFDQSKNGYAGYIDGGASQEEFYKFIKPILEKMDGTEELLAKLNREDLLRKQRTFDNGSIPHQIHLGELHAILRRQEDFYPFLKDNREKIEKILTFRIPYYVGPLARGNSRFAWMTRKSEETITPWNFEEVVDKGASAQSFIERMTNFDKNLPNEKVLPKHSLLYEYFTVYNELTKVKYVTEGMRKPEFLSGKQKEAIVDLLFKTNRKVTVKQLKEDYFKKIECFDSVEISGVEDRFNASLGTYHDLLKIIKDKDFLDNEENEDILEDIVLTLTLFEDKEMIEERLKKYANLFDDKVMKQLKRRHYTGWGRLSRKLINGIRDKQSGKTILDFLKSDGFANRNFMQLINDDSLTFKEAIQKAQVSGQGHSLHEQIANLAGSPAIKKGILQSVKVVDELVKVMGHKPENIVIEMARENQTTQKGQKNSRERMKRIEEGIKELGSQILKEHPVENTQLQNEKLYLYYLQNGRDMYVDQELDINRLSDYDVDHIVPQSFIKDDSIDNKILTRSDKNRGKSDNVPSEEVVKKMKNYWRQLLNAKLITQRKFDNLTKAERGGLSELDKAGFIKRQLVETRQITKHVAQILDSRMNTKYDENDKLIREVKVITLKSKLVSDFRKDFQFYKVREINNYHHAHDAYLNAVVGTALIKKYTKLESEFVYGDYKVYDVRKMIAKSEQEIGKATAKRFFYSNIMNFFKTEITLANGEIRKRPLIETNEETGEIVWDKGRDFATVRKVLSMPQVNIVKKTEVQTGALTNESIYARGSFDKLISRKHRFESSKYGGFGSPTVTYSVLVVAKSKVQDGKVKKIKTGKELIGMTLLDKLVFEKNPLKFIEDKGYGNVQIDKCIKLPKYSLFEFENGTRRMLASVMANNNSRGDLQKANEMFLPAKLVTLLYHAHKIESSKELEHEAYILDHYNDLYQLLSYIERFASLYVDVEKNISKVKELFSNIESYSISEICSSVINLLTLTASGAPADFKFLGTTIPRKRYGSPQSILSSTLIHQSITGLYETRIDLSQLGGD

SEQ ID NO: 111 - protein, 1370 aa, Streptococcus agalactiae; identical to SEQ ID NO: 5

SEQ ID NO: 112 - protein, 1371 aa, Streptococcus gallolyticus
MTEKNYSIGLDIGTNSVGWAVITDDYKVPAKKMKVLGNTDKKYIKKNLLGALLFDNGETAEATRLKRTARRRYTRRKNRLRYLQEIFAEEMAKVDESFFYRLDESFLTTDDKDFERHPIFGNKADEIKYHQEFPTIYHLRKHLADSHEKADLRLIYLALAHMIKFRGHFLIEGELNAENTDVQKLFEAFVEVYDRTFDDSNLSEITVDASSILTEKFSKSRRLENLIKHYPTEKKNTLFGNLVALALGLQPNFKTSFKLSEDAKLQFSKDTYEEDLEELIGKIGDEYADLFTSAKNLYDAILLSGILTVADNTTKAPLSASMIKRYNEHQVDLKKLKEFIKNNASDKYDEIFNDKDKNGYAGYIENGVKQDEFYKYLKTTLSKIDGSDYFLDKIEREDFLRKQRTFDNGSIPHQIHLQEMHAILRRQGEHYAFLKENQAKIEKILTFRIPYYVGPLARKNSRFAWAEYHSDEKITPWNFDEIIDKEKSAEKFITRMTLNDLYLPEEKVLPKHSLVYETYTVYNELTKVKYVNEQGKSNFFDANMKQEIFEHVFKENRKVTKDKFLNYLNKEFPEYRIQDLIGLDKENKSFNASLGTYHDLKKILDKSFLDDKTNETIIEDIIQTLTLFEDRDMIRQRLQKYSDIFTPQQLKKLERRHYTGWGRLSYKLINGIRNKENGKSILDYLIDDGYANRNFMQLISDDTLPFKQIIKDAQIIGDIDDVTSVVRELPGSPAIKKGILQSVKIVDELVKVMGHNPDNIVIEMARENQTTNRGRNQSQQRLKKLQDSLKELGSNILNEEKPSYIEGKVENNHLQDDRLFLYYIQNGKDMYTGDELDIDHLSDYDIDHIIPQAFIKDDSIDNRVLTSSAKNRGKSDDVPSLDIVHDRKADWIRLYKSGLISKRKFDNLTKAERGGLTENDKAGFIKRQLVETRQITKHVAQILDSRFNTERDENDKVIRNVKVITLKSNLVSQFRKDFKFYKVREINDYHHAHDAYLNAVVGTALLKKYPKLAPEFVYGEYKKYDIRKFITSSGDKATAKYFFYSNLMNFFKRVIRYSNGKVVVRPVIECSKDTGEIAWNKQTDFEKVRRVLSYPQVNIVKKVETQTGGFSKESILPKGNSDKLIPRKTKKFRWDTPKYGGFDSPNIAYSVFVIADVEKGKAKKLKTVKELVGISIMERSSFEENPVVFLEKKGYQNVQEDNLIKLPKYSLFEFEGGRRRLLASASELQKGNEVVLSRHLVELLYHAHRVNSFNNSEHLKYVSEHKKEFGEVLSCVENFAKSYVDVEKNLGKIRAVADKIDTFSIEDISISFVNLLTLTALGAPADFNFLGEKIPRKRYTSTKECLNATLIHQSITGLYETRIDLSKLGEE

SEQ ID NO: 113 - protein, 1371 aa, Streptococcus gallolyticus; identical to SEQ ID NO: 112

SEQ ID NO: 114 - protein, 1370 aa, Streptococcus agalactiae; identical to SEQ ID NO: 5

SEQ ID NO: 115 - protein, 1377 aa, Streptococcus agalactiae
MNKPYSIGLDIGTNSVGWSIITDDYKVPAKKMRVLGNTDKEYIKKNLIGALLFDGGNTAADRRLKRTARRRYTRRRNRILYLQEIFAEEMSKVDDSFFHRLEDSFLVEEDKRGSKYPIFATMQEEKYYHEKFPTIYHLRKELADKKEKADLRLVYLALAHIIKFRGHFLIEDDRFDVRNTDIQKQYQAFLEIFDTTFENNHLLSQNVDVEAILTDKISKSAKKDRILAQYPNQKSTGIFAEFLKLIVGNQADFKKHFNLEDKTPLQFAKDSYDEDLENLLGQIGDEFADLFSVAKKLYDSVLLSGILTVTDLSTKAPLSASMIQRYDEHHEDLKHLKQFVKASLPENYREVFADSSKDGYAGYIEGKTNQEAFYKYLLKLLTKQEGSEYFLEKIKNEDFLRKQRTFDNGSIPHQVHLTELRAIIRRQSEYYPFLKENQDRIEKILTFRIPYYVGPLAREKSDFAWMTRKTDDSIRPWNFEDLVDKEKSAEAFIHRMTNNDLYLPEEKVLPKHSLIYEKFTVYNELTKVRFLAEGFKDFQFLNRKQKETIFNSLFKEKRKVTEKDIISFLNKVDGYEGIAIKGIEKQFNASLSTYHDLKKILGKDFLDNTDNELILEDIVQTLTLFEDREMIKKCLDIYKDFFTESQLKKLYRRHYTGWGRLSAKLINGIRNKENQKTILDYLIDDGSANRNFMQLINDDDLSFKPIIDKARTGSHSDNLKEVVGELAGSPAIKKGILQSLKIVDELVKVMGYEPEQIVVEMARENQTTAKGLSRSRQRLTTLRESLANLKSNILEEKKPKYVKDQVENHHLSDDRLFLYYLQNGRDMYTKKALDIDNLSQYDIDHIIPQAFIKDDSIDNRVLVSSAKNRGKSDDVPSIEIVKARKMFWKNLLDAKLMSQRKYDNLTKAERGGLTSDDKARFIQRQLVETRQITKHVARILDERFNNEVDNGKKICKVKIVTLKSNLVSNFRKEFGFYKIREVNDYHHAHDAYLNAVVAKAILTKYPQLEPEFVYGMYRQKKLSKIVHEDKEEKYSEATRKMFFYSNLMNMFKRVVRLADGSIVVRPVIETGRYMRKTAWDKKKHFATVRKVLSYPQNNIVKKTEIQTGGFSKESILAHGNSDKLIPRKTKDIYLDPKKYGGFDSPIVAYSVLVVADIKKGKAQKLKTVTELLGITIMERSRFEKNPSAFLESKGYLNIRDDKLMILPKYSLFELENGRRRLLASAGELQKGNELALPTQFMKFLYLASRYNESKGKPEEIEKKQEFVNQHVSYFDDILQLINDFSKRVILADANLEKINKLYQDNKENIPVDELANNIINLFTFTSLGAPAAFKFFDKIVDRKRYTSTKEVLNSTLIHQSITGLYETRIDLGKLGED

SEQ ID NO: 116 - protein, 1368 aa, Streptococcus pyogenes
MDKKYSIGLDIGTNSVGWAVITDDYKVPSKKLKGLGNTDRHGIKKNLIGALLFDSGETAEATRLKRTARRRYTRRKNRICYLQEIFSNEMAKVDDSFFHRLEESFLVEEDKKHERHPIFGNIVDEVAYHEKYPTIYHLRKKLADSTDKVDLRLIYLALAHMIKFRGHFLIEGDLNPDNSDVDKLFIQLVQTYNQLFEENPINASRVDAKAILSARLSKSRRLENLIAQLPGEKKNGLFGNLIALSLGLTPNFKSNFDLAEDAKLQLSKDTYDDDLDNLLAQIGDQYADLFLAAKNLSDATLLSDILRVNSEITKAPLSASMIKRYDEHHQDLTLLKALVRQQLPEKYKEIFFDQSKNGYAGYIDGGASQEEFYKFIKPILEKMDGTEELLAKLNREDLLRKQRTFDNGSIPYQIHLGELHAILRRQEDFYPFLKDNREKIEKILTFRIPYYVGPLARGNSRFAWMTRKSEETITPWNFEEVVDKGASAQSFIERMTNFDKNLPNEKVLPKHSLLYEYFTVYNELTKVKYVTEGMRKPAFLSGEQKKAIVDLLFKTNRKVTVKQLKEDYFKKIECFDSVEISGVEDRFNASLGTYHDLLKIIKDKDFLDNEENEDILEDIVLTLTLFEDREMIEERLKTYAHLFDDKVMKQLKRRRYTGWGRLSRKLINGIRDKQSGKTILDFLKSDGFANRNFMQLIHDDSLTFKEDIQKAQVSGQGDSLHEHIANLAGSPAIKKGILQTVKVVDELVKVMGRHKPENIVIEMARENQTTQKGQKNSRERMKRIEEGIKELGSDILKEYPVENTQLQNEKLYLYYLQNGRDMYVDQELDINRLSDYDVDHIVPQSFLKDDSIDNKVLTRSDKNRGKSDNVPSEEVVKKMKNYWRQLLNAKLITQRKFDNLTKAERGGLSELDKVGFIKRQLVETRQITKHVAQILDSRMNTKYDENDKLIREVRVITLKSKLVSDFRKDFQFYKVREINNYHHAHDAYLNAVVGTALIKKYPKLESEFVYGDYKVYDVRKMIAKSEQEIGKATAKYFFYSNIMNFFKTEITLANGEIRKRPLIETNGETGEIVWDKGRDFATVRKVLSMPQVNIVKKTEVQTGGFSKESILPKRNSDKLIARKKDWDPKKYGGFDSPTVAYSVLVVAKVEKGKSKKLKSVKELLGITIMERSSFEKDPIDFLEAKGYKEVRKDLIIKLPKYSLFELENGRKRMLASAGELQKGNELALPSKYVNFLYLASHYEKLKGSPEDNEQKQLFVEQHKHYLDEIIEQISEFSKRVILADANLDKVLSAYNKHRDKPIREQAENIIHLFTLTNLGAPAAFKYFDTTIDRKRYTSTKEVLDATLIHQSITGLYETRIDLSQLGGD

SEQ ID NO: 117 - protein, 1345 aa, Streptococcus mutans; identical to SEQ ID NO: 32

SEQ ID NO: 118 - protein, 1370 aa, Streptococcus gallolyticus; identical to SEQ ID NO: 24

SEQ ID NO: 119 - protein, 1368 aa, Streptococcus pyogenes
MDKKYSIGLDIGTNSVGWAVITDDYKVPSKKFKVLGNTDRHSIKKNLIGALLFDSGETAEATRLKRTARRRYTRRKNRICYLQEIFSNEIAKVDDSFFHRLEESFLVEEDKKHERHPIFGNIVDEVAYHEKYPTIYHLRKKLADSTDKADLRLIYLALAHMIKFRGHFLIEGDLNPDNSDVDKLFIQLVQTYNQLFEENPINASRVDAKAILSARLSKSRRLENLIAQLPGEKRNGLFGNLIALSLGLTPNFKSNFDLAEDAKLQLSKDTYDDDLDNLLAQIGDQYADLFLAAKNLSDAILLSDILRVNTEITKAPLSASMIKRYDEHHQDLTLLKALVRQQLPEKYKEIFFDQSKNGYAGYIDGGASQEEFYKFIKPILEKMDGTEELLAKLNREDLLRKQRTFDNGSIPHQIHLGELHAILRRQEDFYPFLKDNREKIEKILTFRIPYYVGPLARGNSRFAWMTRKSEETITPWNFEEVVDKGASAQSFIERMTNFDKNLPNEKVLPKHSLLYEYFTVYNELTKVKYVTEGMRKPAFLSGEQKKAIVDLLFKTNRKVTVKQLKEDYFKKIECFDSVEISGVEDRFNASLGTYHDLLKIIKDKDFLDNEENEDILEDIVLTLTLFEDREMIEERLKTYAHLFDDKVMKQLKRRRYTGWGRLSRKLINGIRDKQSGKTILDFLKSDGFANRNFMQLIHDDSLTFKEDLQKAQVSGQGDSLHEHIANLAGSPAIKKGILQTVKVVDELVKVMGRHKPENIVIEMARENQTTQKGQKNSRERMKRIEEGIKELGSDILKEYPVETTQLQNEKLYLYYLQNGRDMYVDQELDINRLSDYDVDHIVPQSFLKDDSIDNKVLTRSDKNRGKSDNVPSEEVVKKMKNYWKQLLNAKLITQRKFDNLTKAERGGLSELDKAGFIKRQLVETRQITKHVAQILDSRMNTKYDENDKLIREVRVITLKSKLVSDFRKDFQFYKVREINNYHHAHDAYLNAVVGTALIKKYPKLESEFVYGDYKVYDIRKMIAKSEQEIGKATAKYFFYSNIMNFFKTEITLANGEIRKRPLIETNGETGEIVWDKGRDFATVRKVLSMPQVNIVKKTEVQTGGFSKESILPKRNSDKLIARKKDWDPKKYGGFDSPTVAYSVLVVAKVEKGKSKKLKSVKELVGITIMERSSFEKDPVDFLEAKGYKEVRKDLIIKLPKYSLFELENGRKRMLASAGELQKGNELALPSKYVNFLYLASHYEKLKGSPEDNEQKQLFVEQHKHYLDEIIEQISEFSKRVILADANLDKVLSAYNKHRDKPIREQAENIIHLFTLTNLGAPAAFKCFDTTIGRNRYKSIKEVLDATLIHQSITGLYETRIDLSQLGGD

SEQ ID NO: 120 - protein, 1370 aa, Streptococcus agalactiae; identical to SEQ ID NO: 5

SEQ ID NO: 121 - protein, 1371 aa, Streptococcus dysgalactiae
MDKKYSIGLDIGTNSVGWAVITDDYKVPSKKFKVLGNTDRHSIKKNLIGALLFDSGETAEATRLKRTARRRYTRRKNRIRYLQEIFSSEMSKVDDSFFHRLEESFLVEEDKKHERHPIFGNIVDEVAYHEKYPTIYHLRKKLADSTDKADLRLIYLALAHMIKFRGHFLIEGDLNPDNSDVDKLFIQLVQTYNQLFEEKPINASGVDAKAILSARLSKSKRLENLIAQLPGEKKNGLFGNLIALSLGLTPNFKSNFDLAEDAKLQLSKDTYDDDLDNLLAQIGNQYADLFLAAKNLSDAILLSDILRVNSEITKAPLSASMIKRYDEHHQDLTLLKALVRQQLPEKYKEIFFDQSKNGYAGYIDGGASQEEFYKFIKPILEKMDGTEELLAKLNREDLLRKQRTFDNGSIPHQIHLGELHAILRRQEDFYPFLKDNREKIEKILTFRIPYYVGPLARGNSRFAWMTRKSEETITPWNFEEVVDKGASAQSFIERMTNFDKNLPNEKVLPKHSLLYEYFTVYNELTKVKYVTEGMRKPEFLSGKQKEAIVDLLFKTNRKVTVKQLKEDYFKKIECFDSVEISGVEDRFNASLGTYHDLLKIIKDKDFLDNEENEDILEDIVLTLTLFEDKEMIEERLKKYANLFDDKVMKQLKRRHYTGWGRLSRKLINGIRDKQSGKTILDFLKSDGFANRNFMQLINDDSLTFKEAIQKAQVSGQGHSLHEQIANLAGSPAIKKGILQSVKVVDELVKVMGHKPENIVIEMARENQTTQKGQKNSRERMKRIEEGIKELGSQILKEHPVENTQLQNEKLYLYYLQNGRDMYVDQELDINRLSDYDVDHIVPQSFIKDDSIDNKVLTRSDKNRGKSDNVPSEEVVKKMKNYWRQLLNAKLITQRKFDNLTKAERGGLSELDKAGFIKRQLVETRQITKHVAQILDSRMNTKYDENDKLIREVKVITLKSKLVSDFRKDFQFYKVREINNYHHAHDAYLNAVVGTALIKKYPKLESEFVYGDYKVYDVRKMIAKSEQEIGKATAKRFFYSNIMNFFKTEITLANGEIRKRPLIETNEETGEIVWDKGRDFATVRKVLSMPQVNIVKKTEVQTGALTNESIYARGSFDKLISRKHRFESSKYGGFGSPTVTYSVLVVAKSKVQDGKVKKIKTGKELIGITLLDKLVFEKNPLKFIEDKGYGNVQIDKCIKLPKYSLFEFENGTRRMLASVMANNNSRGDLQKANEMFLPAKLVTLLYHAHKIESSKELEHEAYILDHYNDLYQLLSYIERFASLYVDVEKNISKVKELFSNIESYSISEICSSVINLLTLTASGAPADFKFLGTTIPRKRYGSPQSILSSTLIHQSITGLYETRIDLSQLGGD

SEQ ID NO: 122 - protein, 1375 aa, Streptococcus infantarius
MEKSYSIGLDIGTNSVGWAVITDDYKVPAKKMKVLGNTDKKYIKKNLLGALLFDSGETAEVTRLKRTARRRYTRRKNRLRYLQEIFAKEMTKVDESFFQRLEESFLTDDDKTFDSHPIFGNKAEEDAYHQKFPTIYHLRKYLADSQEKADLRLVYLALAHMIKYRGHFLIEGELNAENTDVQKLFNVFVETYDKIVDESHLSEIEVDASSILTEKVSKSRRLENLIKQYPTEKKNTLFGNLIALALGLQPNFKTNFKLSEDAKLQFSKDTYEEDLEELLGKVGDDYADLFISAKNLYDAILLSGILTVDDNSTKAPLSASMIKRYVEHHEDLEKLKEFIKINKLKLYHDIFKDKTKNGYAGYIDNGVKQDEFYKYLKTILTKIDDSDYFLDKIERDDFLRKQRTFDNGSIPHQIHLQEMHSILRRQGDYYPFLKENQAKIEKILTFRIPYYVGPLARKDSRFAWANYHSDEPITPWNFDEVVDKEKSAEKFITRMTLNDLYLPEEKVLPKHSHVYETFTVYNELTKIKYVNEQGESFFFDANMKQEIFDHVFKENRKVTKAKLLSYLNNEFEEFRINDLIGLDKDSKSFNASLGTYHDLKKILDKSFLDDKTNGQIIEDIVLTLTLFEDRDMIHERLQKYSDFFTSQQLKKLERRHYTGWGRLSYKLINGIRNKENNKTILDFLIDDGHANRNFMQLINDESLSFKTIIQEAQVVGDVDDIEAVVHDLPGSPAIKKGILQSVKIVDELVKVMGDNPDNIVIEMARENQTTGYGRNKSNQRLKRLQDSLKEFGSDILSKKKPSYVDSKVENSHLQNDRLFLYYIQNGKDMYTGEELDIDRLSDYDIDHIIPQAFIKDNSIDNKVLTSSAKNRGKSDDVPSIEIVRNRRSYWYKLYKSGLISKRKFDNLTKAERGGLTEADKAGFIKRQLVETRQITKHVAQILDARFNTKRDENDKVIRDVKVITLKSNLVSQFRKEFKFYKVREINDYHHAHDAYLNAVVGTALLKKYPKLTPEFVYGEYKKYDVRKLIAKSSDDYSEMGKATAKYFFYSNLMNFFKTEVKYADGRVFERPDIETNADGEVVWNKQKDFDIVRKVLSYPQVNIVKKVEAQTGGFSKESILSKGDSDKLIPRKTKKVYWNTKKYGGFDSPTVAYSVLVVADIEKGKAKKLKTVKELVGISIMERSFFEENPVSFLEKKGYHNVQEDKLIKLPKYSLFEFEGGRRRLLASATELQKGNEVMLPAHLVELLYHAHRIDSFNSTEHLKYVSEHKKEFEKVLSCVENFSNLYVDVEKNLSKVRAAAESMTNFSLEEISASFINLLTLTALGAPADFNFLGEKIPRKRYTSTKECLSATLIHQSVTGLYETRIDLSKLGEE

SEQ ID NO: 123 - protein, 1368 aa, Streptococcus pyogenes; identical to SEQ ID NO: 31

SEQ ID NO: 124 - protein, 1371 aa, Streptococcus pyogenes
MDKKYSIGLDIGTNSVGWAVITDDYKVPSKKFKVLGNTDRHSIKKNLIGALLFDSGETAEATRLKRTARRRYTRRKNRICYLQEIFSNEMAKVDDSFFHRLEESFLVEEDKKHERHPIFGNIVDEVAYHEKYPTIYHLRKKLADSTDKADLRLIYLALAHMIKFRGHFLIEGDLNPDNSDVDKLFIQLVQTYNQLFEENPINASRVDAKAILSARLSKSRRLENLIAQLPGEKKNGLFGNLIALSLGLTPNFKSNFDLAEDAKLQLSKDTYDDDLDNLLAQIGDQYADLFLAAKNLSDATLLSDILRVNSEITKAPLSASMIKRYDEHHQDLTLLKALVRQQLPEKYKEIFFDQSKNGYAGYIDGGASQEEFYKFIKPILEKMDGTEELLAKLNREDLLRKQRTFDNGSIPHQIHLGELHAILRRQEDFYPFLKDNREKIEKILTFRIPYYVGPLARGNSRFAWMTRKSEETITPWNFEEVVDKGASAQSFIERMTNFDKNLPNEKVLPKHSLLYEYFTVYNELTKVKYVTEGMRKPAFLSGEQKKAIVDLLFKTNRKVTVKQLKEDYFKKIECFDSVEISGVEDRFNASLGTYHDLLKIIKDKDFLDNEENEDILEDIVLTLTLFEDKEMIEERLKTYAHLFDDKVMKQLKRRHYTGWGRLSRKLINGIRDKQSGKTILDFLKSDGFANRNFIQLIHDDSLTFKEAIQKAQVSGQGHSLHEQIANLAGSPAIKKGILQSVKVVDELVKVMGHKPENIVIEMARENQTTQKGQKNSRERMKRIEEGIKELGSQILKEHPVENTQLQNEKLYLYYLQNGRDMYVDQELDINRLSDYDVDHIVPQSFIKDDSIDNKVLTRSDKNRGKSDDVPSEEVVKKMKNYWRQLLNAKLITQRKFDNLTKAERGGLSELDKAGFIKRQLVETRQITKHVAQILDSRMNTKYDENDKLIREVKVITLKSKLVSDFRKDFQFYKVREINNYHHAHDAYLNAVVGTALIKKYPKLESEFVYGDYKVYDVRKMIAKSEQEIGKATAKRFFYSNIMNFFKTEITLANGEIRKRPLIETNEETGEIVWDKGRDFATVRKVLSMPQVNIVKKTEVQTGALTNESIYARGSFDKLISRKHRFESSKYGGFGSPTVTYSVLVVAKSKVQDGKVKKIKTGKELIGITLLDKLVFEKNPLKFIEDKGYGNVQIDKCIKLPKYSLFEFENGTRRMLASVMANNNSRGDLQKANEMFLPAKLVTLLYHAHKIESSKELEHEAYILDHYNDLYQLLSYIERFASLYVDVEKNISKVKELFSNIESYSISEICSSVINLLTLTASGAPADFKFLGTTIPRKRYGSPQSILSSTLIHQSITGLYETRIDLSQLGSD

SEQ ID NO: 125 - protein, 1368 aa, Streptococcus pyogenes; identical to SEQ ID NO: 116

SEQ ID NO: 126 - protein, 1368 aa, Streptococcus pyogenes
MDKKYSIGLDIGTNSVGWAVITDDYKVPSKKFKVLGNTDRHSIKKNLIGALLFDSGEIAEATRLKRTARRRYTRRKNRICYLQEIFSNEMAKVDDSFFHRLEESFLVEEDKKHERHPIFGNIVDEVAYHEKYPTIYHLRKKLVDSTDKADLRLIYLALAHMIKFRGHFLIEGDLNPDNSDVDKLFIQLVQTYNQLFEENPINASGVDAKAILSARLSKSRRLENLIAQLPGEKKNGLFGNLIALSLGLTPNFKSNFDLAEDAKLQLSKDTYDDDLDNLLAQIGDQYADLFLAAKNLSDAILLSDILRLNSEITKAPLSASMIKRYDEHHQDLTLLKALVRQQLPEKYKEIFFDQSKNGYAGYIDGGASQEEFYKFIKPILEKMDGTEELLAKLNREDLLRKQRTFDNGSIPHQIHLGELHAILRRQEDFYPFLKDNREKIEKILTFRIPYYVGPLARGNSRFAWMTRKSEETITPWNFEEVVDKGASAQSFIERMTNFDKNLPNEKVLPKHSLLYEYFTVYNELTKVKYVTEGMRKPAFLSGEQKKAIVDLLFKTNRKVTVKQLKEDYFKKIECFDSVEISGVEDRFNASLGTYHDLLKIIKDKDFLDNEENEDILEDIVLTLTLFEDREMIEERLKTYAHLFDDKVMKQLKRRRYTVWGRLSRKLINGIRDKQSGKTILDFLKSDGFANRNFMQLIHDDSLTFKEDIQKAQVSGQGDSLHEHIANLAGSPAIKKGILQTVKVVDELVKVMGRHKPENIVIEMARENQTTQKGQKNSRERMKRIEEGIKELGSQILKEHPVENTQLQNEKLYLYYLQNGRDMYVDQELDINRLSDYDVDHIVPQSFIKDDSIDNKVLTRSDKNRGKSDNVPSEEVVKKMKNYWRQLLNAKLITQRKFDNLTKAERGGLSELDKAGFIKRQLVETRQITKHVAQILDSRMNTKYDENDKLIREVKVITLKSKLVSDFRKDFQFYKVREINNYHHAHDAYLNAVVGTALIKKYPKLESEFVYGDYKVYDVRKMLAKSEQEIGKATAKYFFYSNIMNFFKTEITLANGEIRKRPLIETNGETGEIVWDKGRDFATVRKVLSMPQVNIVKKTEVQTGGFSKESILPKRNSDKLIARKKDWDPKKYGGFDSPTVAYSVLVVAKVEKGKSKKLKSVKELLGITIMERSSFEKNPIDFLEAKGYKEVRKDLIIKLPKYSLFELENGRKRMLASAGELQKGNELALPSKYVNFLYLASHYEKLKGSPEDNEQKQLFVEQHKHYLDEIIEQISEFSKRVILADANLDKVLSAYNKHRDKPIREQAENIIHLFTLTNLGAPTAFKYFDTTIDRKRYTSTKEVLDATFIHQSITGLYETRIDLSQLGGD

SEQ ID NO: 127 - protein, 1368 aa, Streptococcus pyogenes
MDKKYSIGLDIGTNSVGWAVITDDYKVPSKKFKVLGNTDRHSIKKNLIGALLFDSGETAEATRLKRTARRRYTRRKNRICYLQEIFSNEMAKVDDSFFHRLEESFLVEEDKKHERHPIFGNIVDEVAYHEKYPTIYHLRKKLVDSTDKADLRLIYLALAHMIKFRGHFLIEGDLNPDNSDVDKLFIQLVQTYNQLFEENPINASGVDAKAILSARLSKSRRLENLIAQLPGEKKNGLFGNLIALSLGLTPNFKSNFDLAEDAKLQLSKDTYDDDLDNLLAQIGDQYADLFLAAKNLSDAILLSDILRLNSEITKAPLSASMIKRYDEHHQDLTLLKALVRQQLPEKYKEIFFDQSKNGYAGYIDGGASQEEFYKFIKPILEKMDGTEELLAKLNREDLLRKQRTFDNGSIPHQIHLGELHAILRRQEDFYPFLKDNREKIEKILTFRIPYYVGPLARGNSRFAWMTRKSEETITPWNFEEVVDKGASAQSFIERMTNFDKNLPNEKVLPKHSLLYEYFTVYNELTKVKYVTEGMRKPAFLSGEQKKAIVDLLFKTNRKVTVKQLKEDYFKKIECFDSVEISGVEDRFNASLGTYHDLLKIIKDKDFLDNEENEDILEDIVLTLTLFEDREMIEERLKTYAHLFDDKVMKQLKRRRYTGWGRLSRKLINGIRDKQSGKTILDFLKSDGFANRNFMQLIHDDSLTFKEDIQKAQVSGQGDSLHEHIANLAGSPAIKKGILQTVKVVDELVKVMGRHKPENIVIEMARENQTTQKGQKNSRERMKRIEEGIKELGSQILKEHPVENTQLQNEKLYLYYLQNGRDMYVDQELDINRLSDYDVDHIVPQSFIKDDSIDNKVLTRSDKNRGKSNNVPSEEVVKKMKNYWRQLLNAKLITQRKFDNLTKAERGGLSELDKAGFIKRQLVETRQITKHVAQILDSRMNTKYDENDKLIREVKVITLKSKLVSDFRKDFQFYKVREINNYHHAHDAYLNAVVGTALIKKYPKLESEFVYGDYKVYDVRKMIAKSEQEIGKATAKYFFYSNIMNFFKTEITLANGEIRKRPLIETNGETGEIVWDKGRDFATVRKVLSMPQVNIVKKTEVQTGGFSKESILPKRNSDKLIARKKDWDPKKYGGFDSPTVAYSVLVVAKVEKGKSKKLKSVKELLGITIMERSSFEKNPIDFLEAKGYKEVRKDLIVKLPKYSLFELENGRKRMLASAGELQKGNELALPSKYVNFLYLASHYEKLKGSPEDNEQKQLFVEQHKHYLDEIIEQISEFSKRVILADANLDKVLSAYNKHRDKPIREQAENIIHLFTLTNLGAPAAFKYFDTTIDRKRYTSTKEVLDATFIHQSITGLYETRIDLSQLGGD

SEQ ID NO: 128 - protein, 1368 aa, Streptococcus pyogenes
MDKKYSIGLDIGTNSVGWAVITDDYKVPSKKFKVLGNTDRHSIKKNLIGALLFDSGETAEATRLKRTARRRYTRRKNRICYLQEIFSNEMAKVDDSFFHRLEESFLVEEDKKHERHPIFGNIVDEVAYHEKYPTIYHLRKKLVDSTDKADLRLIYLALAHMIKFRGHFLIEGDLNPDNSDVDKLFIQLVQTYNQLFEENPINASGVDAKAILSARLSKSRRLENLIAQLPGEKKNGLFGNLIALSLGLTPNFKSNFDLAEDAKLQLSKDTYDDDLDNLLAQIGDQYADLFLAAKNLSDAILLSDILRLNSEITKAPLSASMIKRYDEHHQDLTLLKALVRQQLPEKYKEIFFDQSKNGYAGYIDGGASQEEFYKFIKPILEKMDGTEELLAKLNREDLLRKQRTFDNGSIPHQIHLGELHAILRRQEDFYPFLKDNREKIEKILTFRIPYYVGPLARGNSRFAWMTRKSEETITPWNFEEVVDKGASAQSFIERMTNFDKNLPNEKVLPKHSLLYEYFTVYNELTKVKYVTEGMRKPAFLSGEQKKAIVDLLFKTNRKVTVKQLKEDYFKKIECFDSVEISGVEDRFNASLGTYHDLLKIIKDKDFLDNEENEDILEDIVLTLTLFEDREMIEERLKTYAHLFDDKVMKQLKRRRYTGWGRLSRKLINGIRDKQSGKTILDFLKSDGFANRNFMQLIHDDSLTFKEDIQKAQVSGQGDSLHEHIANLAGSPAIKKGILQTVKVVDELVKVMGRHKPENIVIEMARENQTTQKGQKNSRERMKRIEEGIKELGSQILKEHPVENTQLQNEKLYLYYLQNGRDMYVDQELDINRLSDYDVDHIVPQSFIKDDSIDNKVLTRSDKNRGKSDNVPSEEVVKKMKNYWRQLLNAKLITQRKFDNLTKAERGGLSELDKAGFIKRQLVETRQITKHVAQILDSRMNTKYDENDKLIREVKVITLKSKLVSDFRKDFQFYKVREINNYHHAHDAYLNAVVGTALIKKYPKLESEFVYGDYKVYDVRKMIAKSEQEIGKATAKYFFYSNIMNFFKTEITLANGEIRKRPLIETNGETGEIVWDKGRDFATVRKVLSMPQVNIVKKTEVQTGGFSKESILPKRNSDKLIARKKDWDPKKYGGFDSPTVAYSVLVVAKVEKGKSKKLKSVKELLGLTIMERSSFEKNPIDFLEAKGYKEVKKDLIIKLPKYSLFELENGRKRMLASAGELQKGNELALPSKYVNFLYLASHYEKLKGSPEDNEQKQLFVEQHKHYLDEIIEQISEFSKRVILADANLDKVLSAYNKHRDKPIREQAENIIHLFTLTNLGAPAAFKYFDTTIDRKRYTSTKEVLDATLIHQSITGLYETRIDLSQLGGD

SEQ ID NO: 129 - protein, 1398 aa, Veillonella atypica
METQTSNQLITSHLKDYPKQDYFVGLDIGTNSVGWAVTNTSYELLKFHSHKMWGSRLFEEGESAVTRRGFRSMRRRLERRKLRLKLLEELFADAMAQVDSTFFIRLHESKYHYEDKTTGHSSKHILFIDEDYTDQDYFTEYPTIYHLRKDLMENGTDDIRKLFLAVHHILKYRGNFLYEGATFNSNAFTFEDVLKQALVNITFNCFDTNSAISSISNILMESGKTKSDKAKAIERLVDTYTVFDEVNTPDKPQKEQVKEDKKTLKAFANLVLGLSANLIDLFGSVEDIDDDLKKLQIVGDTYDEKRDELAKVWGDEIHIIDDCKSVYDAIILMSIKEPGLTISQSKVKAFDKHKEDLVILKSLLKLDRNVYNEMFKSDKKGLHNYVHYIKQGRTEETSCSREDFYKYTKKIVEGLADSKDKEYILNEIELQTLLPLQRIKDNGVIPYQLHLEELKVILDKCGPKFPFLHTVSDGFSVTEKLIKMLEFRIPYYVGPLNTHHNIDNGGFSWAVRKQAGRVTPWNFEEKIDREKSAAAFIKNLTNKCTYLFGEDVLPKSSLLYSEFMLLNELNNVRIDGKALAQGVKQHLIDSIFKQDHKKMTKNRIELFLKDNNYITKKHKPEITGLDGEIKNDLTSYRDMVRILGNNFDVSMAEDIITDITIFGESKKMLRQTLRNKFGSQLNDETIKKLSKLRYRDWGRLSKKLLKGIDGCDKAGNGAPKTIIELMRNDSYNLMEILGDKFSFMECIEEENAKLAQGQVVNPHDIIDELALSPAVKRAVWQALRIVDEVAHIKKALPSRIFVEVARTNKSEKKKKDSRQKRLSDLYSAIKKDDVLQSGLQDKEFGALKSGLANYDDAALRSKKLYLYYTQMGRCAYTGNIIDLNQLNTDNYDIDHIYPRSLTKDDSFDNLVLCERTANAKKSDIYPIDNRIQTKQKPFWAFLKHQGLISERKYERLTRIAPLTADDLSGFIARQLVETNQSVKATTTLLRRLYPDIDVVFVKAENVSDFRHNNNFIKVRSLNHHHHAKDAYLNIVVGNVYHEKFTRNFRLFFKKNGANRTYNLAKMFNYDVICTNAQDGKAWDVKTSMNTVKKMMASNDVRVTRRLLEQSGALADATIYKASVAAKAKDGAYIGMKTKYSVFADVTKYGGMTKIKNAYSIIVQYTGKKGEEIKEIVPLPIYLINRNATDIELIDYVKSVIPKAKDISIKYRKLCINQLVKVNGFYYYLGGKTNDKIYIDNAIELVVPHDIATYIKLLDKYDLLRKENKTLKASSITTSIYNINTSTVVSLSNKVGIDVFDYFMSKLRTPLYMKMKGNKVDELSSTGRSKFIKMTLEEQSIYLLEVLNLLTNSKTTFDVKPLGITGSRSTIGVKIHNLDEFKIINESITGLYSNEVTIV

SEQ ID NO: 130 - protein, 1374 aa, Fusobacterium nucleatum
MKKQKFSDYYLGFDIGTNSVGWCVTDLDYNVLRFNKKDMWGSRLFDEAKTAAERRVQRNSRRRLKRRKWRLNLLEEIFSDEIMKIDSNFFRRLKESSLWLEDKNSKEKFTLFNDDNYKDYDFYKQYPTIFHLRDELIKNPEKKDIRLIYLALHSIFKSRGHFLFEGQNLKEIKNFETLYNNLISFLEDNGINKSIDKDNIEKLEKIICDSGKGLKDKEKEFKGIFNSDKQLVAIFKLSVGSSVSLNDLFDTDEYKKEEVEKEKISFREQIYEDDKPIYYSILGEKIELLDIAKSFYDFMVLNNILSDSNYISEAKVKLYEEHKKDLKNLKYIIRKYNKENYDKLFKDKNENNYPAYIGLNKEKDKKEVVEKSRLKIDDLIKVIKGYLPKPERIEEKDKTIFNEILNKIELKTILPKQRISDNGTLPYQIHEVELEKILENQSKYYDFLNYEENGVSTKDKLLKTFKFRIPYYVGPLNSYHKDKGGNSWIVRKEEGKILPWNFEQKVDIEKSAEEFIKRMTNKCTYLNGEDVIPKDSFLYSEYIILNELNKVQVNDEFLNEENKRKIIDELFKENKKVSEKKFKEYLLVNQIANRTVELKGIKDSFNSNYVSYIKFKDIFGEKLNLDIYKEISEKSILWKCLYGDDKKIFEKKIKNEYGDILNKDEIKKINSFKFNTWGRLSEKLLTGIEFINLETGECYSSVMEALRRTNYNLMELLSSKFTLQESIDNENKEMNEVSYRDLIEESYVSPSLKRAILQTLKIYEEIKKITGRVPKKVFIEMARGGDESMKNKKIPARQEQLKKLYDSCGNDIANFSIDIKEMKNSLSSYDNNSLRQKKLYLYYLQFGKCMYTGREIDLDRLLQNNDTYDIDHIYPRSKVIKDDSFDNLVLVLKNENAEKSNEYPVKKEIQEKMKSFWRFLKEKNFISDEKYKRLTGKDDFELRGFMARQLVNVRQTTKEVGKILQQIEPEIKIVYSKAEIASSFREMFDFIKVRELNDTHHAKDAYLNIVAGNVYNTKFTEKPYRYLQEIKENYDVKKIYNYDIKNAWDKENSLEIVKKNMEKNTVNITRFIKEEKGELFNLNPIKKGETSNEIISIKPKLYDGKDNKLNEKYGYYTSLKAAYFIYVEHEKKNKKVKTFERITRIDSTLIKNEKNLIKYLVSQKKLLNPKIIKKIYKEQTLIIDSYPYTFTGVDSNKKVELKNKKQLYLEKKYEQILKNALKFVEDNQGETEENYKFIYLKKRNNNEKNETIDAVKERYNIEFNEMYDKFLEKLSSKDYKNYINNKLYTNFLNSKEKFKKLKLWEKSLILREFLKIFNKNTYGKYEIKDSQTKEKLFSFPEDTGRIRLGQSSLGNNKELLEESVTGLFVKKIKL

SEQ ID NO: 131 - protein, 1365 aa, Filifactor alocis
MTKEYYLGLDVGTNSVGWAVTDSQYNLCKFKKKDMWGIRLFESANTAKDRRLQRGNRRRLERKKQRIDLLQEIFSPEICKIDPTFFIRLNESRLHLEDKSNDFKYPLFIEKDYSDIEYYKEFPTIFHLRKHLIESEEKQDIRLIYLALHNIIKTRGHFLIDGDLQSAKQLRPILDTFLLSLQEEQNLSVSLSENQKDEYEEILKNRSIAKSEKVKKLKNLFEISDELEKEEKKAQSAVIENFCKFIVGNKGDVCKFLRVSKEELEIDSFSFSEGKYEDDIVKNLEEKVPEKVYLFEQMKAMYDWNILVDILETEEYISFAKVKQYEKHKTNLRLLRDIILKYCTKDEYNRMFNDEKEAGSYTAYVGKLKKNNKKYWIEKKRNPEEFYKSLGKLLDKIEPLKEDLEVLTMMIEECKNHTLLPIQKNKDNGVIPHQVHEVELKKILENAKKYYSFLTETDKDGYSVVQKIESIFRFRIPYYVGPLSTRHQEKGSNVWMVRKPGREDRIYPWNMEEIIDFEKSNENFITRMTNKCTYLIGEDVLPKHSLLYSKYMVLNELNNVKVRGKKLPTSLKQKVFEDLFENKSKVTGKNLLEYLQIQDKDIQIDDLSGFDKDFKTSLKSYLDFKKQIFGEEIEKESIQNMIEDIIKWITIYGNDKEMLKRVIRANYSNQLTEEQMKKITGFQYSGWGNFSKMFLKGISGSDVSTGETFDIITAMWETDNNLMQILSKKFTFMDNVEDFNSGKVGKIDKITYDSTVKEMFLSPENKRAVWQTIQVAEEIKKVMGCEPKKIFIEMARGGEKVKKRTKSRKAQLLELYAACEEDCRELIKEIEDRDERDFNSMKLFLYYTQFGKCMYSGDDIDINELIRGNSKWDRDHIYPQSKIKDDSIDNLVLVNKTYNAKKSNELLSEDIQKKMHSFWLSLLNKKLITKSKYDRLTRKGDFTDEELSGFIARQLVETRQSTKAIADIFKQIYSSEVVYVKSSLVSDFRKKPLNYLKSRRVNDYHHAKDAYLNIVVGNVYNKKFTSNPIQWMKKNRDTNYSLNKVFEHDVVINGEVIWEKCTYHEDTNTYDGGTLDRIRKIVERDNILYTEYAYCEKGELFNATIQNKNGNSTVSLKKGLDVKKYGGYFSANTSYFSLIEFEDKKGDRARHIIGVPIYIANMLEHSPSAFLEYCEQKGYQNVRILVEKIKKNSLLIINGYPLRIRGENEVDTSFKRAIQLKLDQKNYELVRNIEKFLEKYVEKKGNYPIDENRDHITHEKMNQLYEVLLSKMKKFNKKGMADPSDRIEKSKPKFIKLEDLIDKINVINKMLNLLRCDNDTKADLSLIELPKNAGSFVVKKNTIGKSKIILVNQSVTGLYENRREL

SEQ ID NO: 132 - protein, 1327 aa, Solobacterium moorei
MEGQMKNNGNNLQQGNYYLGLDVGTSSVGWAVTDTDYNVLKFRGKSMWGARLFDEASTAEERRTHRGNRRRLARRKYRLLLLEQLFEKEIRKIDDNFFVRLHESNLWADDKSKPSKFLLFNDTNFTDKDYLKKYPTIYHLRSDLIHNSTEHDIRLVFLALHHLIKYRGHFIYDNSANGDVKTLDEAVSDFEEYLNENDIEFNIENKKEFINVLSDKHLTKKEKKISLKKLYGDITDSENINISVLIEMLSGSSISLSNLFKDIEFDGKQNLSLDSDIEETLNDVVDILGDNIDLLIHAKEVYDIAVLTSSLGKHKYLCDAKVELFEKNKKDLMILKKYIKKNHPEDYKKIFSSPTEKKNYAAYSQTNSKNVCSQEEFCLFIKPYIRDMVKSENEDEVRIAKEVEDKSFLTKLKGTNNSVVPYQIHERELNQILKNIVAYLPFMNDEQEDISVVDKIKLIFKFKIPYYVGPLNTKSTRSWVYRSDEKIYPWNFSNVIDLDKTAHEFMNRLIGRCTYTNDPVLPMDSLLYSKYNVLNEINPIKVNGKAIPVEVKQAIYTDLFENSKKKVTRKSIYIYLLKNGYIEKEDIVSGIDIEIKSKLKSHHDFTQIVQENKCTPEEIERIIKGILVYSDDKSMLRRWLKNNIKGLSENDVKYLAKLNYKEWGRLSKTLLTDIYTINPEDGEACSILDIMWNTNATLMEILSNEKYQFKQNIENYKAENYDEKQNLHEELDDMYISPAARRSIWQALRIVDEIVDIKKSAPKKIFIEMAREKKSAMKKKRTESRKDTLLELYKSCKSQADGFYDEELFEKLSNESNSRLRRDQLYLYYTQMGRSMYTGKRIDFDKLINDKNTYDIDHIYPRSKIKDDSITNRVLVEKDINGEKTDIYPISEDIRQKMQPFWKILKEKGLINEEKYKRLTRNYELTDEELSSFVARQLVETQQSTKALATLLKKEYPSAKIVYSKAGNVSEFRNRKDKELPKFREINDLHHAKDAYLNIVVGNVYDTKFTEKFFNNIRNENYSLKRVFDFSVPGAWDAKGSTFNTIKKYMAKNNPIIAFAPYEVKGELFDQQIVPKGKGQFPIKQGKDIEKYGGYNKLSSAFLFAVEYKGKKARERSLETVYIKDVELYLQDPIKYCESVLGLKEPQIIKPKILMGSLFSINNKKLVVTGRSGKQYVCHHIYQLSINDEDSQYLKNIAKYLQEEPDGNIERQNILNITSVNNIKLFDVLCTKFNSNTYEIILNSLKNDVNEGREKFSELDILEQCNILLQLLKAFKCNRESSNLEKLNNKKQAGVIVIPHLFTKCSVFKVIHQSITGLFEKEMDLLK

SEQ ID NO: 133 - protein, 1338 aa, Coprococcus catus
MKQEYFLGLDMGTGSLGWAVTDSTYQVMRKHGKALWGTRLFESASTAEERRMFRTARRRLDRRNWRIQVLQEIFSEEISKVDPGFFLRMKESKYYPEDKRDAEGNCPELPYALFVDDNYTDKNYHKDYPTIYHLRKMLMETTEIPDIRLVYLVLHHMMKHRGHFLLSGDISQIKEFKSTFEQLIQNIQDEELEWHISLDDAAIQFVEHVLKDRNLTRSTKKSRLIKQLNAKSACEKAILNLLSGGTVKLSDIFNNKELDESERPKVSFADSGYDDYIGIVEAELAEQYYIIASAKAVYDWSVLVEILGNSVSISEAKIKVYQKHQADLKTLKKIVRQYMTKEDYKRVFVDTEEKLNNYSAYIGMTKKNGKKVDLKSKQCTQADFYDFLKKNVIKVIDHKEITQEIESEIEKENFLPKQVTKDNGVIPYQVHDYELKKILDNLGTRMPFIKENAEKIQQLFEFRIPYYVGPLNRVDDGKDGKFTWSVRKSDARIYPWNFTEVIDVEASAEKFIRRMTNKCTYLVGEDVLPKDSLVYSKFMVLNELNNLRLNGEKISVELKQRIYEELFCKYRKVTRKKLERYLVIEGIAKKGVEITGIDGDFKASLTAYHDFKERLTDVQLSQRAKEAIVLNVVLFGDDKKLLKQRLSKMYPNLTTGQLKGICSLSYQGWGRLSKTFLEEITVPAPGTGEVWNIMTALWQTNDNLMQLLSRNYGFTNEVEEFNTLKKETDLSYKTVDELYVSPAVKRQIWQTLKVVKEIQKVMGNAPKRVFVEMAREKQEGKRSDSRKKQLVELYRACKNEERDWITELNAQSDQQLRSDKLFLYYIQKGRCMYSGETIQLDELWDNTKYDIDHIYPQSKTMDDSLNNRVLVKKNYNAIKSDTYPLSLDIQKKMMSFWKMLQQQGFITKEKYVRLVRSDELSADELAGFIERQIVETRQSTKAVATILKEALPDTEIVYVKAGNVSNFRQTYELLKVREMNDLHHAKDAYLNIVVGNAYFVKFTKNAAWFIRNNPGRSYNLKRMFEFDIERSGEIAWKAGNKGSIVTVKKVMQKNNILVTRKAYEVKGGLFDQQIMKKGKGQVPIKGNDERLADIEKYGGYNKAAGTYFMLVKSLDKKGKEIRTIEFVPLYLKNQIEINHESAIQYLAQERGLNSPEILLSKIKIDTLFKVDGFKMWLSGRTGNQLIFKGANQLILSHQEAAILKGVVKYVNRKNENKDAKLSERDGMTEEKLLQLYDTFLDKLSNTVYSIRLSAQIKTLTEKRAKFIGLSNEDQCIVLNEILHMFQCQSGSANLKLIGGPGSAGILVMNNNITACKQISVINQSPTGIYEKEIDLIKL

SEQ ID NO: 134 - protein, 1395 aa, Treponema denticola
MKKEIKDYFLGLDVGTGSVGWAVTDTDYKLLKANRKDLWGMRCFETAETAEVRRLHRGARRRIERRKKRIKLLQELFSQEIAKTDEGFFQRMKESPFYAEDKTILQENTLFNDKDFADKTYHKAYPTINHLIKAWIENKVKPDPRLLYLACHNIIKKRGHFLFEGDFDSENQFDTSIQALFEYLREDMEVDIDADSQKVKEILKDSSLKNSEKQSRLNKILGLKPSDKQKKAITNLISGNKINFADLYDNPDLKDAEKNSISFSKDDFDALSDDLASILGDSFELLLKAKAVYNCSVLSKVIGDEQYLSFAKVKIYEKHKTDLTKLKNVIKKHFPKDYKKVFGYNKNEKNNNNYSGYVGVCKTKSKKLIINNSVNQEDFYKFLKTILSAKSEIKEVNDILTEIETGTFLPKQISKSNAEIPYQLRKMELEKILSNAEKHFSFLKQKDEKGLSHSEKIIMLLTFKIPYYIGPINDNHKKFFPDRCWVVKKEKSPSGKTTPWNFFDHIDKEKTAEAFITSRTNFCTYLVGESVLPKSSLLYSEYTVLNEINNLQIIIDGKNICDIKLKQKIYEDLFKKYKKITQKQISTFIKHEGICNKTDEVIILGIDKECTSSLKSYIELKNIFGKQVDEISTKNMLEEIIRWATIYDEGEGKTILKTKIKAEYGKYCSDEQIKKILNLKFSGWGRLSRKFLETVTSEMPGFSEPVNIITAMRETQNNLMELLSSEFTFTENIKKINSGFEDAEKQFSYDGLVKPLFLSPSVKKMLWQTLKLVKEISHITQAPPKKIFIEMAKGAELEPARTKTRLKILQDLYNNCKNDADAFSSEIKDLSGKIENEDNLRLRSDKLYLYYTQLGKCMYCGKPIEIGHVFDTSNYDIDHIYPQSKIKDDSISNRVLVCSSCNKNKEDKYPLKSEIQSKQRGFWNFLQRNNFISLEKLNRLTRATPISDDETAKFIARQLVETRQATKVAAKVLEKMFPETKIVYSKAETVSMFRNKFDIVKCREINDFHHAHDAYLNIVVGNVYNTKFTNNPWNFIKEKRDNPKIADTYNYYKVFDYDVKRNNITAWEKGKTIITVKDMLKRNTPIYTRQAACKKGELFNQTIMKKGLGQHPLKKEGPFSNISKYGGYNKVSAAYYTLIEYEEKGNKIRSLETIPLYLVKDIQKDQDVLKSYLTDLLGKKEFKILVPKIKINSLLKINGFPCHITGKTNDSFLLRPAVQFCCSNNEVLYFKKIIRFSEIRSQREKIGKTISPYEDLSFRSYIKENLWKKTKNDEIGEKEFYDLLQKKNLEIYDMLLTKHKDTIYKKRPNSATIDILVKGKEKFKSLIIENQFEVILEILKLFSATRNVSDLQHIGGSKYSGVAKIGNKISSLDNCILIYQSITGIFEKRIDLLKV

SEQ ID NO: 135 - protein, 1364 aa, Peptoniphilus duerdenii
MKNLKEYYIGLDIGTASVGWAVTDESYNIPKFNGKKMWGVRLFDDAKTAEERRTQRGSRRRLNRRKERINLLQDLFATEISKVDPNFFLRLDNSDLYREDKDEKLKSKYTLFNDKDFKDRDYHKKYPTIHHLIMDLIEDEGKKDIRLLYLACHYLLKNRGHFIFEGQKFDTKNSFDKSINDLKIHLRDEYNIDLEFNNEDLIEIITDTTLNKTNKKKELKNIVGDTKFLKAISAIMIGSSQKLVDLFEDGEFEETTVKSVDFSTTAFDDKYSEYEEALGDTISLLNILKSIYDSSILENLLKDADKSKDGNKYISKAFVKKFNKHGKDLKTLKRIIKKYLPSEYANIFRNKSINDNYVAYTKSNITSNKRTKASKFTKQEDFYKFIKKHLDTIKETKLNSSENEDLKLIDEMLTDIEFKTFIPKLKSSDNGVIPYQLKLMELKKILDNQSKYYDFLNESDEYGTVKDKVESIMEFRIPYYVGPLNPDSKYAWIKRENTKITPWNFKDIVDLDSSREEFIDRLIGRCTYLKEEKVLPKASLIYNEFMVLNELNNLKLNEFLITEEMKKAIFEELFKTKKKVTLKAVSNLLKKEFNLTGDILLSGTDGDFKQGLNSYIDFKNIIGDKVDRDDYRIKIEEIIKLIVLYEDDKTYLKKKIKSAYKNDFTDDEIKKIAALNYKDWGRLSKRFLTGIEGVDKTTGEKGSIIYFMREYNLNLMELMSGHYTFTEEVEKLNPVENRELCYEMVDELYLSPSVKRMLWQSLRVVDEIKRIIGKDPKKIFIEMARAKEAKNSRKESRKNKLLEFYKFGKKAFINEIGEERYNYLLNEINSEEESKFRWDNLYLYYTQLGRCMYSLEPIDLADLKSNNIYDQDHIYPKSKIYDDSLENRVLVKKNLNHEKGNQYPIPEKVLNKNAYGFWKILFDKGLIGQKKYTRLTRRTPFEERELAEFIERQIVETRQATKETANLLKNICQDSEIVYSKAENASRFRQEFDIIKCRTVNDLHHMHDAYLNIVVGNVYNTKFTKNPLNFIKDKDNVRSYNLENMFKYDVVRGSYTAWIADDSEGNVKAATIKKVKRELEGKNYRFTRMSYIGTGGLYDQNLMRKGKGQIPQKENTNKSNIEKYGGYNKASSAYFALIESDGKAGRERTLETIPIMVYNQEKYGNTEAVDKYLKDNLELQDPKILKDKIKINSLIKLDGFLYNIKGKTGDSLSIAGSVQLIVNKEEQKLIKKMDKFLVKKKDNKDIKVTSFDNIKEEELIKLYKTLSDKLNNGIYSNKRNNQAKNISEALDKFKEISIEEKIDVLNQIILLFQSYNNGCNLKSIGLSAKTGVVFIPKKLNYKECKLINQSITGLFENEVDLLNL

SEQ ID NO: 136 - protein, 1329 aa, Catenibacterium mitsuokai
IVDYCIGLDLGTGSVGWAVVDMNHRLMKRNGKHLWGSRLFSNAETAANRRASRSIRRRYNKRRERIRLLRAILQDMVLEKDPTFFIRLEHTSFLDEEDKAKYLGTDYKDNYNLFIDEDFNDYTYYHKYPTIYHLRKALCESTEKADPRLIYLALHHIVKYRGNFLYEGQKFNMDASNIEDKLSDIFTQFTSFNNIPYEDDEKKNLEILEILKKPLSKKAKVDEVMTLIAPEKDYKSAFKELVTGIAGNKMNVTKMILCEPIKQGDSEIKLKFSDSNYDDQFSEVEKDLGEYVEFVDALHNVYSWVELQTIMGATHTDNASISEAMVSRYNKHHDDLKLLKDCIKNNVPNKYFDMFRNDSEKSKGYYNYINRPSKAPVDEFYKYVKKCIEKVDTPEAKQILNDIELENFLLKQNSRTNGSVPYQMQLDEMIKIIDNQAEYYPILKEKREQLLSILTFRIPYYFGPLNETSEHAWIKRLEGKENQRILPWNYQDIVDVDATAEGFIKRMRSYCTYFPDEEVLPKNSLIVSKYEVYNELNKIRVDDKLLEVDVKNDIYNELFMKNKTVTEKKLKNWLVNNQCCSKDAEIKGFQKENQFSTSLTPWIDFTNIFGKIDQSNFDLIENIIYDLTVFEDKKIMKRRLKKKYALPDDKVKQILKLKYKDWSRLSKKLLDGIVADNRFGSSVTVLDVLEMSRLNLMEIINDKDLGYAQMIEEATSCPEDGKFTYEEVERLAGSPALKRGIWQSLQIVEEITKVMKCRPKYIYIEFERSEEAKERTESKIKKLENVYKDLDEQTKKEYKSVLEELKGFDNTKKISSDSLFLYFTQLGKCMYSGKKLDIDSLDKYQIDHIVPQSLVKDDSFDNRVLVVPSENQRKLDDLVVPFDIRDKMYRFWKLLFDHELISPKKFYSLIKTEYTERDEERFINRQLVETRQITKNVTQIIEDHYSTTKVAAIRANLSHEFRVKNHIYKNRDINDYHHAHDAYIVALIGGFMRDRYPNMHDSKAVYSEYMKMFRKNKNDQKRWKDGFVINSMNYPYEVDGKLIWNPDLINEIKKCFYYKDCYCTTKLDQKSGQLFNLTVLSNDAHADKGVTKAVVPVNKNRSDVHKYGGFSGLQYTIVAIEGQKKKGKKTELVKKISGVPLHLKAASINEKINYIEEKEGLSDVRIIKDNIPVNQMIEMDGGEYLLTSPTEYVNARQLVLNEKQCALIADIYNAIYKQDYDNLDDILMIQLYIELTNKMKVLYPAYRGIAEKFESMNENYVVISKEEKANIIKQMLIVMHRGPQNGNIVYDDFKISDRIGRLKTKNHNLNNIVFISQSPTGIYTKKYKL

SEQ ID NO: 137 - protein, 1345 aa, Streptococcus mutans; identical to SEQ ID NO: 32

SEQ ID NO: 138 - protein, 1368 aa, Streptococcus pyogenes [sequence omitted]

SEQ ID NO: 139 - protein, 1334 aa, Listeria innocua
MKKPYTIGLDIGTNSVGWAVLTDQYDLVKRKMKIAGDSEKKQIKKNFWGVRLFDEGQTAADRRMARTARRRIERRRNRISYLQGIFAEEMSKTDANFFCRLSDSFYVDNEKRNSRHPFFATIEEEVEYHKNYPTIYHLREELVNSSEKADLRLVYLALAHIIKYRGNFLIEGALDTQNTSVDGIYKQFIQTYNQVFASGIEDGSLKKLEDNKDVAKILVEKVTRKEKLERILKLYPGEKSAGMFAQFISLIVGSKGNFQKPFDLIEKSDIECAKDSYEEDLESLLALIGDEYAELFVAAKNAYSAVVLSSIITVAETETNAKLSASMIERFDTHEEDLGELKAFIKLHLPKHYEEIFSNTEKHGYAGYIDGKTKQADFYKYMKMTLENIEGADYFIAKIEKENFLRKQRTFDNGAIPHQLHLEELEAILHQQAKYYPFLKENYDKIKSLVTFRIPYFVGPLANGQSEFAWLTRKADGEIRPWNIEEKVDFGKSAVDFIEKMTNKDTYLPKENVLPKHSLCYQKYLVYNELTKVRYINDQGKTSYFSGQEKEQIFNDLFKQKRKVKKKDLELFLRNMSHVESPTIEGLEDSFNSSYSTYHDLLKVGIKQEILDNPVNTEMLENIVKILTVFEDKRMIKEQLQQFSDVLDGVVLKKLERRHYTGWGRLSAKLLMGIRDKQSHLTILDYLMNDDGLNRNLMQLINDSNLSFKSIIEKEQVTTADKDIQSIVADLAGSPAIKKGILQSLKIVDELVSVMGYPPQTIVVEMARENQTTGKGKNNSRPRYKSLEKAIKEFGSQILKEHPTDNQELRNNRLYLYYLQNGKDMYTGQDLDIHNLSNYDIDHIVPQSFITDNSIDNLVLTSSAGNREKGDDVPPLEIVRKRKVFWEKLYQGNLMSKRKFDYLTKAERGGLTEADKARFIHRQLVETRQITKNVANILHQRFNYEKDDHGNTMKQVRIVTLKSALVSQFRKQFQLYKVRDVNDYHHAHDAYLNGVVANTLLKVYPQLEPEFVYGDYHQFDWFKANKATAKKQFYTNIMLFFAQKDRIIDENGEILWDKKYLDTVKKVMSYRQMNIVKKTEIQKGEFSKATIKPKGNSSKLIPRKTNWDPMKYGGLDSPNMAYAVVIEYAKGKNKLVFEKKIIRVTIMERKAFEKDEKAFLEEQGYRQPKVLAKLPKYTLYECEEGRRRMLASANEAQKGNQQVLPNHLVTLLHHAANCEVSDGKSLDYIESNREMFAELLAHVSEFAKRYTLAEANLNKINQLFEQNKEGDIKAIAQSFVDLMAFNAMGAPASFKFFETTIERKRYNNLKELLNSTIIYQSITGLYESRKRLDD

SEQ ID NO: 140 - protein, 1388 aa, Streptococcus thermophilus; identical to SEQ ID NO: 1

SEQ ID NO: 141 - protein, 1334 aa, Staphylococcus pseudintermedius
MGRKPYILSLDIGTGSVGYACMDKGFNVLKYHDKDALGVYLFDGALTAQERRQFRTSRRRKNRRIKRLGLLQELLAPLVQNPNFYQFQRQFAWKNDNMDFKNKSLSEVLSFLGYESKKYPTIYHLQEALLLKDEKFDPELIYMALYHLVKYRGHFLFDHLKIENLTNNDNMHDFVELIETYENLNNIKLNLDYEKTKVIYEILKDNEMTKNDRAKRVKNMEKKLEQFSIMLLGLKFNEGKLFNHADNAEELKGANQSHTFADNYEENLTPFLTVEQSEFIERANKIYLSLTLQDILKGKKSMAMSKVAAYDKFRNELKQVKDIVYKADSTRTQFKKIFVSSKKSLKQYDATPNDQTFSSLCLFDQYLIRPKKQYSLLIKELKKIIPQDSELYFEAENDTLLKVLNTTDNASIPMQINLYEAETILRNQQKYHAEITDEMIEKVLSLIQFRIPYYVGPLVNDHTASKFGWMERKSNESIKPWNFDEVVDRSKSATQFIRRMTNKCSYLINEDVLPKNSLLYQEMEVLNELNATQIRLQTDPKNRKYRMMPQIKLFAVEHIFKKYKTVSHSKFLEIMLNSNHRENFMNHGEKLSIFGTQDDKKFASKLSSYQDMTKIFGDIEGKRAQIEEIIQWITIFEDKKILVQKLKECYPELTSKQINQLKKLNYSGWGRLSEKLLTHAYQGHSIIELLRHSDENFMEILTNDVYGFQNFIKEENQVQSNKIQHQDIANLTTSPALKKGIWSTIKLVRELTSIFGEPEKIIMEFATEDQQKGKKQKSRKQLWDDNIKKNKLKSVDEYKYIIDVANKLNNEQLQQEKLWLYLSQNGKCMYSGQSIDLDALLSPNATKHYEVDHIFPRSFIKDDSIDNKVLVIKKMNQTKGDQVPLQFIQQPYERIAYWKSLNKAGLISDSKLHKLMKPEFTAMDKEGFIQRQLVETRQISVHVRDFLKEEYPNTKVIPMKAKMVSEFRKKFDIPKIRQMNDAHHAIDAYLNGVVYHGAQLAYPNVDLFDFNFKWEKVREKWKALGEFNTKQKSRELFFFKKLEKMEVSQGERLISKIKLDMNHFKINYSRKLANIPQQFYNQTAVSPKTAELKYESNKSNEVVYKGLTPYQTYVVAIKSVNKKGKEKMEYQMIDHYVFDFYKFQNGNEKELALYLAQRENKDEVLDAQIVYSLNKGDLLYINNHPCYFVSRKEVINAKQFELTVEQQLSLYNVMNNKETNVEKLLIEYDFIAEKVINEYHHYLNSKLKEKRVRTFFSESNQTHEDFIKALDELFKVVTASATRSDKIGSRKNSMTHRAFLGKGKDVKIAYTSISGLKTTKPKSLFKLAESRNEL

SEQ ID NO: 142 - protein, 1358 aa, Acidaminococcus intestini
MGKMYYLGLDIGTNSVGYAVTDPSYHLLKFKGEPMWGAHVFAAGNQSAERRSFRTSRRRLDRRQQRVKLVQEIFAPVISPIDPRFFIRLHESALWRDDVAETDKHIFFNDPTYTDKEYYSDYPTIHHLIVDLMESSEKHDPRLVYLAVAWLVAHRGHFLNEVDKDNIGDVLSFDAFYPEFLAFLSDNGVSPWVCESKALQATLLSRNSVNDKYKALKSLIFGSQKPEDNFDANISEDGLIQLLAGKKVKVNKLFPQESNDASFTLNDKEDAIEEILGTLTPDECEWIAHIRRLFDWAIMKHALKDGRTISESKVKLYEQHHHDLTQLKYFVKTYLAKEYDDIFRNVDSETTKNYVAYSYHVKEVKGTLPKNKATQEEFCKYVLGKVKNIECSEADKVDFDEMIQRLTDNSFMPKQVSGENRVIPYQLYYYELKTILNKAASYLPFLTQCGKDAISNQDKLLSIMTFRIPYFVGPLRKDNSEHAWLERKAGKIYPWNFNDKVDLDKSEEAFIRRMTNTCTYYPGEDVLPLDSLIYEKFMILNEINNIRIDGYPISVDVKQQVFGLFEKKRRVTVKDIQNLLLSLGALDKHGKLTGIDTTIHSNYNTYHHFKSLMERGVLTRDDVERIVERMTYSDDTKRVRLWLNNNYGTLTADDVKHISRLRKHDFGRLSKMFLTGLKGVHKETGERASILDFMWNTNDNLMQLLSECYTFSDEITKLQEAYYAKAQLSLNDFLDSMYISNAVKRPIYRTLAVVNDIRKACGTAPKRIFIEMARDGESKKKRSVTRREQIKNLYRSIRKDFQQEVDFLEKILENKSDGQLQSDALYLYFAQLGRDMYTGDPIKLEHIKDQSFYNIDHIYPQSMVKDDSLDNKVLVQSEINGEKSSRYPLDAAIRNKMKPLWDAYYNHGLISLKKYQRLTRSTPFTDDEKWDFINRQLVETRQSTKALAILLKRKFPDTEIVYSKAGLSSDFRHEFGLVKSRNINDLHHAKDAFLAIVTGNVYHERFNRRWFMVNQPYSVKTKTLFTHSIKNGNFVAWNGEEDLGRIVKMLKQNKNTIHFTRFSFDRKEGLFDIQPLKASTGLVPRKAGLDVVKYGGYDKSTAAYYLLVRFTLEDKKTQHKLMMIPVEGLYKARIDHDKEFLTDYAQTTISEILQKDKQKVINIMFPMGTRHIKLNSMISIDGFYLSIGGKSSKGKSVLCHAMVPLIVPHKIECYIKAMESFARKFKENNKLRIVEKFDKITVEDNLNLYELFLQKLQHNPYNKFFSTQFDVLTNGRSTFTKLSPEEQVQTLLNILSIFKTCRSSGCDLKSINGSAQAARIMISADLTGLSKKYSDIRLVEQSASGLFVSKSQNLLEYL

SEQ ID NO: 143 - protein, 1399 aa, Olsenella uli
MNLRNTTDEYNIGLDMGTNSVGWAVTDKAGAIAHFKGKPTLGSRLFDAAQTAAGARIHRSQRRRYVRRRWRLDLLQSLFQDEVSKVDSEFFCRLRQSRLYVGDREKGHADYTWPIFNDSDFNEVDYYKRFPTIYHLRKWLMETDEKADIRLIYLATHNIVKHRGNFLRENNKSLSSRDANPAQAVKSLRLALNDWCSERDYECAWKGEEDDGAIDEAILNVLADGEKGRSDQAKEIAKLTGVDCGDAKQSKQCNEAIAKAIVGLKVEMKNIFGEFPAEKTSYIYLSSDEDVEAVRESCPDDSGELFQALCKLYSAYILQELLSYADPSGQTISANMVAKYKQYGRDLRLLKELTRTYAPQKYDLFFRGETYAGSSDYVVDEARGYTRYNLGTTKANYDDFQKSVKELFKGTDALQDERYQEMMVAFGEQKFLRRLKTSDNGSIYYQLHLEELHTILENQGKHYPFLLSEEDKIESLVSFRIPYYVGPLTRKNAAIGHDGKERFAWSSRKDGMEHAVITPWNWEEIIDRDKSAEDFIMRMTGDCTYLQGEPVLPKCSLLYEEFCALNEFNGAHWTVDGDDERRFDAAQRERIMCDLFRRTRSVTYNKVSDWLERKYNFTGARVRGGQGEHGFESKLGSYIFFCKDVFKTDGLDEADYTMIEQIILWSTLFEDRDILKRKIEEAYGGDRLTSEQIKVICKKRFTGWGRLSKRLLTDIKVNTDTGRKSIMDVLREGNPNNGQRSRTMVFMEVLRDEDLGFQKAIDGLNRDYFREHNNGLMDVNDLPGSPAIRRSINQAVRIVDEIASIARKEPTNIFIEVTREEDDPRKKGKRTKRRYDAIKSALEKFKKDDPSLWKELCEKAPGDMDERLSLYFMQRGKCMYSGRPIKIEELHTGKYEVDHIIPRSYIKDDSFENKVLVYREENQHKTDALLIDSSIRQKMGGYWRMLHDAKLVGDKKFRNLFRNHIDDKAMKGFVARQIVETSQMVKLVQTLFEARYPNTRIVPVKAGISHDLREAAGLVKCREANDFHHAHDAFLACRIGLFIQKRHPSVYDNPIGLARIMRDYARMQAREYKKSHCLAHTQGFIVNSFLSSGFDEETGEIFKDDWDAKAEVEGIRRVLNCRQCFISRMPVEGDTRYGGRYWGETIYSPKGKHKHEIPLKQGLDPNLYGGYSDLLYSYFLIYEASDVSSGERVLRFIGIPTSIAARMANQKRLEEYVSRLALQENLEHVRMVRKIMKKQLIEVDNCRLLVTAADAVTNATELAFSLDEMKIISTCAKCINGADPSAIDKIGNAQDSFFDNLKRRGSDRCALLFSQLKLDKLSQNFYMISSDDKSKILISILDRIRAKSNSVDLSLVGGAKHAAQMKFDFNAKLNNPASSFVLIDQSVTGMFERRTRIGL

SEQ ID NO: 144 - protein, 1389 aa, Oenococcus kitaharae
MARDYSVGLDIGTSSVGWAAIDNKYHLIRAKSKNLIGVRLFDSAVTAEKRRGYRTTRRRLSRRHWRLRLLNDIFAGPLTDFGDENFLARLKYSWVHPQDQSNQAHFAAGLLFDSKEQDKDFYRKYPTIYHLRLALMNDDQKHDLREVYLAIHHLVKYRGHFLIEGDVKADSAFDVHTFADAIQRYAESNNSDENLLGKIDEKKLSAALTDKHGSKSQRAETAETAFDILDLQSKKQIQAILKSVVGNQANLMAIFGLDSSAISKDEQKNYKFSFDDADIDEKIADSEALLSDTEFEFLCDLKAAFDGLTLKMLLGDDKTVSAAMVRRFNEHQKDWEYIKSHIRNAKNAGNGLYEKSKKFDGINAAYLALQSDNEDDRKKAKKIFQDEISSADIPDDVKADFLKKIDDDQFLPIQRTKNNGTIPHQLHRNELEQIIEKQGIYYPFLKDTYQENSHELNKITALINFRVPYYVGPLVEEEQKIADDGKNIPDPTNHWMVRKSNDTITPWNLSQVVDLDKSGRRFIERLTGTDTYLIGEPTLPKNSLLYQKFDVLQELNNIRVSGRRLDIRAKQDAFEHLFKVQKTVSATNLKDFLVQAGYISEDTQIEGLADVNGKNFNNALTTYNYLVSVLGREFVENPSNEELLEEITELQTVFEDKKVLRRQLDQLDGLSDHNREKLSRKHYTGWGRISKKLLTTKIVQNADKIDNQTFDVPRMNQSIIDTLYNTKMNLMEIINNAEDDFGVRAWIDKQNTTDGDEQDVYSLIDELAGPKEIKRGIVQSFRILDDITKAVGYAPKRVYLEFARKTQESHLTNSRKNQLSTLLKNAGLSELVTQVSQYDAAALQNDRLYLYFLQQGKDMYSGEKLNLDNLSNYDIDHIIPQAYTKDNSLDNRVLVSNITNRRKSDSSNYLPALIDKMRPFWSVLSKQGLLSKHKFANLTRTRDFDDMEKERFIARSLVETRQIIKNVASLIDSHFGGETKAVAIRSSLTADMRRYVDIPKNRDINDYHHAFDALLFSTVGQYTENSGLMKKGQLSDSAGNQYNRYIKEWIHAARLNAQSQRVNPFGFVVGSMRNAAPGKLNPETGEITPEENADWSIADLDYLHKVMNFRKITVTRRLKDQKGQLYDESRYPSVLHDAKSKASINFDKHKPVDLYGGFSSAKPAYAALIKFKNKFRLVNVLRQWTYSDKNSEDYILEQIRGKYPKAEMVLSHIPYGQLVKKDGALVTISSATELHNFEQLWLPLADYKLINTLLKTKEDNLVDILHNRLDLPEMTIESAFYKAFDSILSFAFNRYALHQNALVKLQAHRDDFNALNYEDKQQTLERILDALHASPASSDLKKINLSSGFGRLFSPSHFTLADTDEFIFQSVTGLFSTQKTVAQLYQETK

SEQ ID NO: 145 - protein, 1420 aa, Bifidobacterium bifidum
MSRKNYVDDYAISLDIGNASVGWSAFTPNYRLVRAKGHELIGVRLFDPADTAESRRMARTTRRRYSRRRWRLRLLDALFDQALSEIDPSFLARRKYSWVHPDDENNADCWYGSVLFDSNEQDKRFYEKYPTIYHLRKALMEDDSQHDIREIYLAIHHMVKYRGNFLVEGTLESSNAFKEDELLKLLGRITRYEMSEGEQNSDIEQDDENKLVAPANGQLADALCATRGSRSMRVDNALEALSAVNDLSREQRAIVKAIFAGLEGNKLDLAKIFVSKEFSSENKKILGIYFNKSDYEEKCVQIVDSGLLDDEEREFLDRMQGQYNAIALKQLLGRSTSVSDSKCASYDAHRANWNLIKLQLRTKENEKDINENYGILVGWKIDSGQRKSVRGESAYENMRKKANVFFKKMIETSDLSETDKNRLIHDIEEDKLFPIQRDSDNGVIPHQLHQNELKQIIKKQGKYYPFLLDAFEKDGKQINKIEGLLTFRVPYFVGPLVVPEDLQKSDNSENHWMVRKKKGEITPWNFDEMVDKDASGRKFIERLVGTDSYLLGEPTLPKNSLLYQEYEVLNELNNVRLSVRTGNHWNDKRRMRLGREEKTLLCQRLFMKGQTVTKRTAENLLRKEYGRTYELSGLSDESKFTSSLSTYGKMCRIFGEKYVNEHRDLMEKIVELQTVFEDKETLLHQLRQLEGISEADCALLVNTHYTGWGRLSRKLLTTKAGECKISDDFAPRKHSIIEIMRAEDRNLMEIITDKQLGFSDWIEQENLGAENGSSLMEVVDDLRVSPKVKRGIIQSIRLIDDISKAVGKRPSRIFLELADDIQPSGRTISRKSRLQDLYRNANLGKEFKGIADELNACSDKDLQDDRLFLYYTQLGKDMYTGEELDLDRLSSAYDIDHIIPQAVTQNDSIDNRVLVARAENARKTDSFTYMPQIADRMRNFWQILLDNGLISRVKFERLTRQNEFSEREKERFVQRSLVETRQIMKNVATLMRQRYGNSAAVIGLNAELTKEMHRYLGFSHKNRDINDYHHAQDALCVGIAGQFAANRGFFADGEVSDGAQNSYNQYLRDYLRGYREKLSAEDRKQGRAFGFIVGSMRSQDEQKRVNPRTGEVVWSEEDKDYLRKVMNYRKMLVTQKVGDDFGALYDETRYAATDPKGIKGIPFDGAKQDTSLYGGFSSAKPAYAVLIESKGKTRLVNVTMQEYSLLGDRPSDDELRKVLAKKKSEYAKANILLRHVPKMQLIRYGGGLMVIKSAGELNNAQQLWLPYEEYCYFDDLSQGKGSLEKDDLKKLLDSILGSVQCLYPWHRFTEEELADLHVAFDKLPEDEKKNVITGIVSALHADAKTANLSIVGMTGSWRRMNNKSGYTFSDEDEFIFQSPSGLFEKRVTVGELKRKAKKEVNSKYRTNEKRLPTLSGASQP

SEQ ID NO: 146 - protein, 1363 aa, Lactobacillus rhamnosus
MTKLNQPYGIGLDIGSNSIGFAVVDANSHLLRLKGETAIGARLFREGQSAADRRGSRTTRRRLSRTRWRLSFLRDFFAPHITKIDPDFFLRQKYSEISPKDKDRFKYEKRLFNDRTDAEFYEDYPSMYHLRLHLMTHTHKADPREIFLAIHHILKSRGHFLTPGAAKDFNTDKVDLEDIFPALTEAYAQVYPDLELTFDLAKADDFKAKLLDEQATPSDTQKALVNLLLSSDGEKEIVKKRKQVLTEFAKAITGLKTKFNLALGTEVDEADASNWQFSMGQLDDKWSNIETSMTDQGTEIFEQIQELYRARLLNGIVPAGMSLSQAKVADYGQHKEDLELFKTYLKKLNDHELAKTIRGLYDRYINGDDAKPFLREDFVKALTKEVTAHPNEVSEQLLNRMGQANFMLKQRTKANGAIPIQLQQRELDQIIANQSKYYDWLAAPNPVEAHRWKMPYQLDELLNFHIPYYVGPLITPKQQAESGENVFAWMVRKDPSGNITPYNFDEKVDREASANTFIQRMKTTDTYLIGEDVLPKQSLLYQKYEVLNELNNVRINNECLGTDQKQRLIREVFERHSSVTIKQVADNLVAHGDFARRPEIRGLADEKRFLSSLSTYHQLKEILHEAIDDPTKLLDIENIITWSTVFEDHTIFETKLAEIEWLDPKKINELSGIRYRGWGQFSRKLLDGLKLGNGHTVIQELMLSNHNLMQILADETLKETMTELNQDKLKTDDIEDVINDAYTSPSNKKALRQVLRVVEDIKHAANGQDPSWLFIETADGTGTAGKRTQSRQKQIQTVYANAAQELIDSAVRGELEDKIADKASFTDRLVLYFMQGGRDIYTGAPLNIDQLSHYDIDHILPQSLIKDDSLDNRVLVNATINREKNNVFASTLFAGKMKATWRKWHEAGLISGRKLRNLMLRPDEIDKFAKGFVARQLVETRQIIKLTEQIAAAQYPNTKIIAVKAGLSHQLREELDFPKNRDVNHYHHAFDAFLAARIGTYLLKRYPKLAPFFTYGEFAKVDVKKFREFNFIGALTHAKKNIIAKDTGEIVWDKERDIRELDRIYNFKRMLITHEVYFETADLFKQTIYAAKDSKERGGSKQLIPKKQGYPTQVYGGYTQESGSYNALVRVAEADTTAYQVIKISAQNASKIASANLKSREKGKQLLNEIVVKQLAKRRKNWKPSANSFKIVIPRFGMGTLFQNAKYGLFMVNSDTYYRNYQELWLSRENQKLLKKLFSIKYEKTQMNHDALQVYKAIIDQVEKFFKLYDINQFRAKLSDAIERFEKLPINTDGNKIGKTETLRQILIGLQANGTRSNVKNLGIKTDLGLLQVGSGIKLDKDTQIVYQSPSGLFKRRIPLADL

SEQ ID NO: 147 - protein, 1391 aa, Lactobacillus gasseri
MTKIKNEYIVGLDVGTNSCGWVAMDFQNTILRMHGKTAIGSHLFDAGNSAADRRAFRTTRRRIKRRKWRLKLLEEIFDPYMTEVDPYFFARLKESGLSPLDKRKNVSSIVFPTALEDKKFYCNYPTIYHLRYDLMSEDKKFDLREIYLAIHHIVKYRGNFLYNTPVKDFEASKIDVKDSLEKLNELYERLDSEFTVELDSSNALEIEKIIRDKKVFKINKVKSIHQLLSLKTENKERTKLIKDVSKQIINAILGYKTKFETILLKNISKDEADDWEFKLTDVDADNKFENLIGDLNENEQEILLEIRNLANAITLSNIVEEGKTLSESMIDKYNKHSDDLELLKQVISDHPDRDKAKKLALAYDLYVNNRHGKLLQAKDVLGSKKTLSKEDFYKEVKKNLDDSKASQEILDTIALDSFMPKQRTNENGVIPYQLHQLELDRIIKNQGKYYPFLKEVNPVSSHLKEAPYKLDELIRFRVPYYVGPLISPNESTKNKQTKKNQNFAWMIRKEQGQITPWNFDQKVDRMASANKFIKRMTTKDTYLLGEDVLPANSLLYQKFTVLNELNNIKINGKRISVPLKEELYNNLFKKNSTVTTNKLKSYLKENYNLINVEIKGLADEKKFNSGLTTYNKLRNLKIFDQQLDDLNYDKDFERIIEWSTIFEDKAIYKDKLKTIKWLSDRQIDKLSKIRMQGWGQLSKKLLSQLTDNNGQTIIEQLWDSQNNFMQIVNQSDFKDAIAVANQNLLVNTSVEDILNEAYTSPANKKAIRQVVKVVDDIVKAASGKVPKQIAIEFTRDADDKAKISQTRANKLRKVYKELSNELASETIRNELERVAKDQKLLKDKYYLYFMQLGRDAYTGEPINIDDLGQYDIDHILPQSFIKDDSLENRVLVKKAVNNGKSDNVPVKLYGNRMAADLGMTIRHMWEKWKDQGLITKTKYNNLIIDPDKINKYESSGFIHRQLVETSQIIKLVSTILQSKYPDTEIIVVKARYNHYLRKHLNLYKSREVNDYHHAIDAYLSAICGNLLYQVYPYLRPFFVYGQYKKFSSDPKKEKIIYDKTRKYNFISQIFENKSNDIISLETKKKVFDKKDIIEKLKHAYNYKYMLVSRETETHDQEMFKMTVYPRLSRDTKKSRNLISKKKDMPTEIYGGYTNNSDAYMVIARINKKKGTEYRVFGVPMRELVNLRKAEKNGRYNAYLKQVLEPEIMYSKNGKKNKTISSFEIVKAKVPYKQVILDGDKKFMLASSTYVQNAKQLTLSQNSMQAITDNCENDTEEEKALEEKALIEAYDEILTNIDKYLPLFDINKFREKLHAGREKFINLSLDVKKDTILQVLNGLHDNAVMPKIKSLGLSTPLGFMQFSSGVPLSENAKLIYQSPTGLFEKRVKISDL

SEQ ID NO: 148 - protein, 1348 aa, Finegoldia magna
MKSEKKYYIGLDVGTNSVGWAVTDEFYNILRAKGKDLWGVRLFEKADTAANTRIFRSGRRRNDRKGMRLQILREIFEDEIKKVDKDFYDRLDESKFWAEDKKVSGKYSLFNDKNFSDKQYFEKFPTIFHLRKYLMEEHGKVDIRYYFLAINQMMKRRGHFLIDGQISHVTDDKPLKEQLILLINDLLKIELEEELMDSIFEILADVNEKRTDKKNNLKELIKGQDFNKQEGNILNSIFESIVTGKAKIKNIISDEDILEKIKEDNKEDFVLTGDSYEENLQYFEEVLQENITLFNTLKSTYDFLILQSILKGKSTLSDAQVERYDEHKKDLEILKKVIKKYDEDGKLFKQVFKEDNGNGYVSYIGYYLNKNKKITAKKKISNIEFTKYVKGILEKQCDCEDEDVKYLLGKIEQENFLLKQISSINSVIPHQIHLFELDKILENLAKNYPSFNNKKEEFTKIEKIRKTFTFRIPYYVGPLNDYHKNNGGNAWIFRNKGEKIRPWNFEKIVDLHKSEEEFIKRMLNQCTYLPEETVLPKSSILYSEYMVLNELNNLRINGKPLDTDVKLKLIEELFKKKTKVTLKSIRDYMVRNNFADKEDFDNSEKNLEIASNMKSYIDFNNILEDKFDVEMVEDLIEKITIHTGNKKLLKKYIEETYPDLSSSQIQKIINLKYKDWGRLSRKLLDGIKGTKKETEKTDTVINFLRNSSDNLMQIIGSQNYSFNEYIDKLRKKYIPQEISYEVVENLYVSPSVKKMIWQVIRVTEEITKVMGYDPDKIFIEMAKSEEEKKTTISRKNKLLDLYKAIKKDERDSQYEKLLTGLNKLDDSDLRSRKLYLYYTQMGRDMYTGEKIDLDKLFDSTHYDKDHIIPQSMKKDDSIINNLVLVNKNANQTTKGNIYPVPSSIRNNPKIYNYWKYLMEKEFISKEKYNRLIRNTPLTNEELGGFINRQLVETRQSTKAIKELFEKFYQKSKIIPVKASLASDLRKDMNTLKSREVNDLHHAHDAFLNIVAGDVWNREFTSNPINYVKENREGDKVKYSLSKDFTRPRKSKGKVIWTPEKGRKLIVDTLNKPSVLISNESHVKKGELFNATIAGKKDYKKGKIYLPLKKDDRLQDVSKYGGYKAINGAFFFLVEHTKSKKRIRSIELFPLHLLSKFYEDKNTVLDYAINVLQLQDPKIIIDKINYRTEIIIDNFSYLISTKSNDGSITVKPNEQMYWRVDEISNLKKIENKYKKDAILTEEDRKIMESYIDKIYQQFKAGKYKNRRTTDTIIEKYEIIDLDTLDNKQLYQLLVAFISLSYKTSNNAVDFTVIGLGTECGKPRITNLPDNTYLVYKSITGIYEKRIRIK

SEQ ID NO: 149 - protein, 1236 aa, Mycoplasma mobile
MYFYKNKENKLNKKVVLGLDLGIASVGWCLTDISQKEDNKFPIILHGVRLFETVDDSDDKLLNETRRKKRGQRRRNRRLFTRKRDFIKYLIDNNIIELEFDKNPKILVRNFIEKYINPFSKNLELKYKSVTNLPIGFHNLRKAAINEKYKLDKSELIVLLYFYLSLRGAFFDNPEDTKSKEMNKNEIEIFDKNESIKNAEFPIDKIIEFYKISGKIRSTINLKFGHQDYLKEIKQVFEKQNIDFMNYEKFAMEEKSFFSRIRNYSEGPGNEKSFSKYGLYANENGNPELIINEKGQKIYTKIFKTLWESKIGKCSYDKKLYRAPKNSFSAKVFDITNKLTDWKHKNEYISERLKRKILLSRFLNKDSKSAVEKILKEENIKFENLSEIAYNKDDNKINLPIINAYHSLTTIFKKHLINFENYLISNENDLSKLMSFYKQQSEKLFVPNEKGSYEINQNNNVLHIFDAISNILNKFSTIQDRIRILEGYFEFSNLKKDVKSSEIYSEIAKLREFSGTSSLSFGAYYKFIPNLISEGSKNYSTISYEEKALQNQKNNFSHSNLFEKTWVEDLIASPTVKRSLRQTMNLLKEIFKYSEKNNLEIEKIVVEVTRSSNNKHERKKIEGINKYRKEKYEELKKVYDLPNENTTLLKKLWLLRQQQGYDAYSLRKIEANDVINKPWNYDIDHIVPRSISFDDSFSNLVIVNKLDNAKKSNDLSAKQFIEKIYGIEKLKEAKENWGNWYLRNANGKAFNDKGKFIKLYTIDNLDEFDNSDFINRNLSDTSYITNALVNHLTFSNSKYKYSVVSVNGKQTSNLRNQIAFVGIKNNKETEREWKRPEGFKSINSNDFLIREEGKNDVKDDVLIKDRSFNGHHAEDAYFITIISQYFRSFKRIERLNVNYRKETRELDDLEKNNIKFKEKASFDNFLLINALDELNEKLNQMRFSRMVITKKNTQLFNETLYSGKYDKGKNTIKKVEKLNLLDNRTDKIKKIEEFFDEDKLKENELTKLHIFNHDKNLYETLKIIWNEVKIEIKNKNLNEKNYFKYFVNKKLQEGKISFNEWVPILDNDFKIIRKIRYIKFSSEEKETDEIIFSQSNFLKIDQRQNFSFHNTLYWVQIWVYKNQKDQYCFISIDARNSKFEKDEIKINYEKLKTQKEKLQIINEEPILKINKGDLFENEEKELFYIVGRDEKPQKLEIKYILGKKIKDQKQIQKPVKKYFPNWKKVNLTYMGEIFKK

SEQ ID NO: 150 - protein, 1269 aa, Mycoplasma gallisepticum
MNNSIKSKPEVTIGLDLGVGSVGWAIVDNETNIIHHLGSRLFSQAKTAEDRRSFRGVRRLIRRRKYKLKRFVNLIWKYNSYFGFKNKEDILNNYQEQQKLHNTVLNLKSEALNAKIDPKALSWILHDYLKNRGHFYEDNRDFNVYPTKELAKYFDKYGYYKGIIDSKEDNDNKLEEELTKYKFSNKHWLEEVKKVLSNQTGLPEKFKEEYESLFSYVRNYSEGPGSINSVSPYGIYHLDEKEGKVVQKYNNIWDKTIGKCNIFPDEYRAPKNSPIAMIFNEINELSTIRSYSIYLTGWFINQEFKKAYLNKLLDLLIKTNGEKPIDARQFKKLREETIAESIGKETLKDVENEEKLEKEDHKWKLKGLKLNTNGKIQYNDLSSLAKFVHKLKQHLKLDFLLEDQYATLDKINFLQSLFVYLGKHLRYSNRVDSANLKEFSDSNKLFERILQKQKDGLFKLFEQTDKDDEKILAQTHSLSTKAMLLAITRMTNLDNDEDNQKNNDKGWNFEAIKNFDQKFIDITKKNNNLSLKQNKRYLDDRFINDAILSPGVKRILREATKVFNAILKQFSEEYDVTKVVIELARELSEEKELENTKNYKKLIKKNGDKISEGLKALGISEDEIKDILKSPTKSYKFLLWLQQDHIDPYSLKEIAFDDIFTKTEKFEIDHIIPYSISFDDSSSNKLLVLAESNQAKSNQTPYEFISSGNAGIKWEDYEAYCRKFKDGDSSLLDSTQRSKKFAKMMKTDTSSKYDIGFLARNLNDTRYATIVFRDALEDYANNHLVEDKPMFKVVCINGSVTSFLRKNFDDSSYAKKDRDKNIHHAVDASIISIFSNETKTLFNQLTQFADYKLFKNTDGSWKKIDPKTGVVTEVTDENWKQIRVRNQVSEIAKVIEKYIQDSNIERKARYSRKIENKTNISLFNDTVYSAKKVGYEDQIKRKNLKTLDIHESAKENKNSKVKRQFVYRKLVNVSLLNNDKLADLFAEKEDILMYRANPWVINLAEQIFNEYTENKKIKSQNVFEKYMLDLTKEFPEKFSEFLVKSMLRNKTAIIYDDKKNIVHRIKRLKMLSSELKENKLSNVIIRSKNQSGTKLSYQDTINSLALMIMRSIDPTAKKQYIRVPLNTLNLHLGDHDFDLHNMDAYLKKPKFVKYLKANEIGDEYKPWRVLTSGTLLIHKKDKKLMYISSFQNLNDVIEIKNLIETEYKENDDSDSKKKKKANRFLMTLSTILNDYILLDAKDNFDILGLSKNRIDEILNSKLGLDKIVK

SEQ ID NO: 151 - protein, 1265 aa, Mycoplasma ovipneumoniae
MHNKKNITIGFDLGIASIGWAIIDSTTSKILDWGTRTFEERKTANERRAFRSTRRNIRRKAYRNQRFINLILKYKDLFELKNISDIQRANKKDTENYEKIISFFTEIYKKCAAKHSNILEVKVKALDSKIEKLDLIWILHDYLENRGFFYDLEEENVADKYEGIEHPSILLYDFFKKNGFFKSNSSIPKDLGGYSFSNLQWVNEIKKLFEVQEINPEFSEKFLNLFTSVRDYAKGPGSEHSASEYGIFQKDEKGKVFKKYDNIWDKTIGKCSFFVEENRSPVNYPSYEIFNLLNQLINLSTDLKTTNKKIWQLSSNDRNELLDELLKVKEKAKIISISLKKNEIKKIILKDFGFEKSDIDDQDTIEGRKIIKEEPTTKLEVTKHLLATIYSHSSDSNWININNILEFLPYLDAICIILDREKSRGQDEVLKKLTEKNIFEVLKIDREKQLDFVKSIFSNTKFNFKKIGNFSLKAIREFLPKMFEQNKNSEYLKWKDEEIRRKWEEQKSKLGKTDKKTKYLNPRIFQDEIISPGTKNTFEQAVLVLNQIIKKYSKENIIDAIIIESPREKNDKKTIEEIKKRNKKGKGKTLEKLFQILNLENKGYKLSDLETKPAKLLDRLRFYHQQDGIDLYTLDKINIDQLINGSQKYEIEHIIPYSMSYDNSQANKILTEKAENLKKGKLIASEYIKRNGDEFYNKYYEKAKELFINKYKKNKKLDSYVDLDEDSAKNRFRFLTLQDYDEFQVEFLARNLNDTRYSTKLFYHALVEHFENNEFFTYIDENSSKHKVKISTIKGHVTKYFRAKPVQKNNGPNENLNNNKPEKIEKNRENNEHHAVDAAIVAIIGNKNPQIANLLTLADNKTDKKFLLHDENYKENIETGELVKIPKFEVDKLAKVEDLKKIIQEKYEEAKKHTAIKFSRKTRTILNGGLSDETLYGFKYDEKEDKYFKIIKKKLVTSKNEELKKYFENPFGKKADGKSEYTVLMAQSHLSEFNKLKEIFEKYNGFSNKTGNAFVEYMNDLALKEPTLKAEIESAKSVEKLLYYNFKPSDQFTYHDNINNKSFKRFYKNIRIIEYKSIPIKFKILSKHDGGKSFKDTLFSLYSLVYKVYENGKESYKSIPVTSQMRNFGIDEFDFLDENLYNKEKLDIYKSDFAKPIPVNCKPVFVLKKGSILKKKSLDIDDFKETKETEEGNYYFISTISKRFNRDTAYGLKPLKLSVVKPVAEPSTNPIFKEYIPIHLDELGNEYPVKIKEHTDDEKLMCTIK

SEQ ID NO: 152 - protein, 1233 aa, Mycoplasma canis
MEKKRKVTLGFDLGIASVGWAIVDSETNQVYKLGSRLFDAPDTNLERRTQRGTRRLLRRRKYRNQKFYNLVKRTEVFGLSSREAIENRFRELSIKYPNIIELKTKALSQEVCPDEIAWILHDYLKNRGYFYDEKETKEDFDQQTVESMPSYKLNEFYKKYGYFKGALSQPTESEMKDNKDLKEAFFFDFSNKEWLKEINYFFNVQKNILSETFIEEFKKIFSFTRDISKGPGSDNMPSPYGIFGEFGDNGQGGRYEHIWDKNIGKCSIFTNEQRAPKYLPSALIFNFLNELANIRLYSTDKKNIQPLWKLSSVDKLNILLNLFNLPISEKKKKLTSTNINDIVKKESIKSIMISVEDIDMIKDEWAGKEPNVYGVGLSGLNIEESAKENKFKFQDLKILNVLINLLDNVGIKFEFKDRNDIIKNLELLDNLYLFLIYQKESNNKDSSIDLFIAKNESLNIENLKLKLKEFLLGAGNEFENHNSKTHSLSKKAIDEILPKLLDNNEGWNLEAIKNYDEEIKSQIEDNSSLMAKQDKKYLNDNFLKDAILPPNVKVTFQQAILIFNKIIQKFSKDFEIDKVVIELAREMTQDQENDALKGIAKAQKSKKSLVEERLEANNIDKSVFNDKYEKLIYKIFLWISQDFKDPYTGAQISVNEIVNNKVEIDHIIPYSLCFDDSSANKVLVHKQSNQEKSNSLPYEYIKQGHSGWNWDEFTKYVKRVFVNNVDSILSKKERLKKSENLLTASYDGYDKLGFLARNLNDTRYATILFRDQLNNYAEHHLIDNKKMFKVIAMNGAVTSFIRKNMSYDNKLRLKDRSDFSHHAYDAAIIALFSNKTKTLYNLIDPSLNGIISKRSEGYWVIEDRYTGEIKELKKEDWTSIKNNVQARKIAKEIEEYLIDLDDEVFFSRKTKRKTNRQLYNETIYGIATKTDEDGITNYYKKEKFSILDDKDIYLRLLREREKFVINQSNPEVIDQIIEIIESYGKENNIPSRDEAINIKYTKNKINYNLYLKQYMRSLTKSLDQFSEEFINQMIANKTFVLYNPTKNTTRKIKFLRLVNDVKINDIRKNQVINKFNGKNNEPKAFYENINSLGAIVFKNSANNFKTLSINTQIAIFGDKNWDIEDFKTYNMEKIEKYKEIYGIDKTYNFHSFIFPGTILLDKQNKEFYYISSIQTVRDIIEIKFLNKIEFKDENKNQDTSKTPKRLMFGIKSIMNNYEQVDISPFGINKKIFE

SEQ ID NO: 153 - protein, 1304 aa, Mycoplasma synoviae
MLNNVQNLWKYLLLLIFDKKIIFLFKIKVILIRRYMENNNKEKIVIGFDLGVASVGWSIVNAETKEVIDLGVRLFSEPEKADYRRAKRTTRRLLRRKKFKREKFHKLILKNAEIFGLQSRNEILNVYKDQSSKYRNILKLKINALKEEIKPSELVWILRDYLQNRGYFYKNEKLTDEFVSNSFPSKKLHEHYEKYGFFRGSVKLDNKLDNKKDKAKEKDEEEESDAKKESEELIFSNKQWINEIVKVFENQSYLTESFKEEYLKLFNYVRPFNKGPGSKNSRTAYGVFSTDIDPETNKFKDYSNIWDKTIGKCSLFEEEIRAPKNLPSALIFNLQNEICTIKNEFTEFKNWWLNAEQKSEILKFVFTELFNWKDKKYSDKKFNKNLQDKIKKYLLNFALENFNLNEEILKNRDLENDTVLGLKGVKYYEKSNATADAALEFSSLKPLYVFIKFLKEKKLDLNYLLGLENTEILYFLDSIYLAISYSSDLKERNEWFKKLLKELYPKIKNNNLEIIENVEDIFEITDQEKFESFSKTHSLSREAFNHIIPLLLSNNEGKNYESLKHSNEELKKRTEKAELKAQQNQKYLKDNFLKEALVPLSVKTSVLQAIKIFNQIIKNFGKKYEISQVVIEMARELTKPNLEKLLNNATNSNIKILKEKLDQTEKFDDFTKKKFIDKIENSVVFRNKLFLWFEQDRKDPYTQLDIKINEIEDETEIDHVIPYSKSADDSWFNKLLVKKSTNQLKKNKTVWEYYQNESDPEAKWNKFVAWAKRIYLVQKSDKESKDNSEKNSIFKNKKPNLKFKNITKKLFDPYKDLGFLARNLNDTRYATKVFRDQLNNYSKHHSKDDENKLFKVVCMNGSITSFLRKSMWRKNEEQVYRFNFWKKDRDQFFHHAVDASIIAIFSLLTKTLYNKLRVYESYDVQRREDGVYLINKETGEVKKADKDYWKDQHNFLKIRENAIEIKNVLNNVDFQNQVRYSRKANTKLNTQLFNETLYGVKEFENNFYKLEKVNLFSRKDLRKFILEDLNEESEKNKKNENGSRKRILTEKYIVDEILQILENEEFKDSKSDINALNKYMDSLPSKFSEFFSQDFINKCKKENSLILTFDAIKHNDPKKVIKIKNLKFFREDATLKNKQAVHKDSKNQIKSFYESYKCVGFIWLKNKNDLEESIFVPINSRVIHFGDKDKDIFDFDSYNKEKLLNEINLKRPENKKFNSINEIEFVKFVKPGALLLNFENQQIYYISTLESSSLRAKIKLLNKMDKGKAVSMKKITNPDEYKIIEHVNPLGINLNWTKKLENNN

SEQ ID NO: 154 - protein, 1114 aa, Eubacterium rectale
MNYTEKEKLFMKYILALDIGIASVGWAILDKESETVIEAGSNIFPEASAADNQLRRDMRGAKRNNRRLKTRINDFIKLWENNNLSIPQFKSTEIVGLKVRAITEEITLDELYLILYSYLKHRGISYLEDALDDTVSGSSAYANGLKLNAKELETHYPCEIQQERLNTIGKYRGQSQIINENGEVLDLSNVFTIGAYRKEIQRVFEIQKKYHPELTDEFCDGYMLIFNRKRKYYEGPGNEKSRTDYGRFTTKLDANGNYITEDNIFEKLIGKCSVYPDELRAAAASYTAQEYNVLNDLNNLTINGRKLEENEKHEIVERIKSSNTINMRKIISDCMGENIDDFAGARIDKSGKEIFHKFEVYNKMRKALLEIGIDISNYSREELDEIGYIMTINTDKEAMMEAFQKSWIDLSDDVKQCLINMRKTNGALFNKWQSFSLKIMNELIPEMYAQPKEQMTLLTEMGVTKGTQEEFAGLKYIPVDVVSEDIFNPVVRRSVRISFKILNAVLKKYKALDTIVIEMPRDRNSEEQKKRINDSQKLNEKEMEYIEKKLAVTYGIKLSPSDFSSQKQLSLKLKLWNEQDGICLYSGKTIDPNDIINNPQLFEIDHIIPRSISFDDARSNKVLVYRSENQKKGNQTPYYYLTHSHSEWSFEQYKATVMNLSKKKEYAISRKKIQNLLYSEDITKMDVLKGFINRNINDTSYASRLVLNTIQNFFMANEADTKVKVIKGSYTHQMRCNLKLDKNRDESYSHHAVDAMLIGYSELGYEAYHKLQGEFIDFETGEILRKDMWDENMSDEVYADYLYGKKWANIRNEVVKAEKNVKYWHYVMRKSNRGLCNQTIRGTREYDGKQYKINKLDIRTKEGIKVFAKLAFSKKDSDRERLLVYLNDRRTFDDLCKIYEDYSDAANPFVQYEKETGDIIRKYSKKHNGPRIDKLKYKDGEVGACIDISHKYGFEKGSKKVILESLVPYRMDVYYKEENHSYYLVGVKQSDIKFEKGRNVIDEEAYARILVNEKMIQPGQSRADLENLGFKFKLSFYKNDIIEYEKDGKIYTERLVSRTMPKQRNYIETKPIDKAKFEKQNLVGLGKTKFIKKYRYDILGNKYSCSEEKFTSFC

SEQ ID NO: 155 - protein, 1121 aa, Streptococcus thermophilus
MSDLVLGLDIGIGSVGVGILNKVTGEIIHKNSRIFPAAQAENNLVRRTNRQGRRLARRKKHRRVRLNRLFEESGLITDFTKISINLNPYQLRVKGLTDELSNEELFIALKNMVKHRGISYLDDASDDGNSSVGDYAQIVKENSKQLETKTPGQIQLERYQTYGQLRGDFTVEKDGKKHRLINVFPTSAYRSEALRILQTQQEFNPQITDEFINRYLEILTGKRKYYHGPGNEKSRTDYGRYRTSGETLDNIFGILIGKCTFYPDEFRAAKASYTAQEFNLLNDLNNLTVPTETKKLSKEQKNQIINYVKNEKAMGPAKLFKYIAKLLSCDVADIKGYRIDKSGKAEIHTFEAYRKMKTLETLDIEQMDRETLDKLAYVLTLNTEREGIQEALEHEFADGSFSQKQVDELVQFRKANSSIFGKGWHNFSVKLMMELIPELYETSEEQMTILTRLGKQKTTSSSNKTKYIDEKLLTEEIYNPVVAKSVRQAIKIVNAAIKEYGDFDNIVIEMARETNEDDEKKAIQKIQKANKDEKDAAMLKAANQYNGKAELPHSVFHGHKQLATKIRLWHQQGERCLYTGKTISIHDLINNSNQFEVDHILPLSITFDDSLANKVLVYATANQEKGQRTPYQALDSMDDAWSFRELKAFVRESKTLSNKKKEYLLTEEDISKFDVRKKFIERNLVDTRYASRVVLNALQEHFRAHKIDTKVSVVRGQFTSQLRRHWGIEKTRDTYHHHAVDALIIAASSQLNLWKKQKNTLVSYSEDQLLDIETGELISDDEYKESVFKAPYQHFVDTLKSKEFEDSILFSYQVDSKFNRKISDATIYATRQAKVGKDKADETYVLGKIKDIYTQDGYDAFMKIYKKDKSKFLMYRHDPQTFEKVIEPILENYPNKQINEKGKEVPCNPFLKYKEEHGYIRKYSKKGNGPEIKSLKYYDSKLGNHIDITPKDSNNKVVLQSVSPWRADVYFNKTTGKYEILGLKYADLQFEKGTGTYKISQEKYNDIKKKEGVDSDSEFKFTLYKNDLLLVKDTETKEQQLFRFLSRTMPKQKHYVELKPYDKQKFEGGEALIKVLGNVANSGQCKKGLGKSNISIYKVRTDVLGNQHIIKNEGDKPKLDF

SEQ ID NO: 156 - protein, 1150 aa, Enterococcus faecalis
MYSIGLDLGISSVGWSVIDERTGNVIDLGVRLFSAKNSEKNLERRTNRGGRRLIRRKTNRLKDAKKILAAVGFYEDKSLKNSCPYQLRVKGLTEPLSRGEIYKVTLHILKKRGISYLDEVDTEAAKESQDYKEQVRKNAQLLTKYTPGQIQLQRLKENNRVKTGINAQGNYQLNVFKVSAYANELATILKTQQAFYPNELTDDWIALFVQPGIAEEAGLIYRKRPYYHGPGNEANNSPYGRWSDFQKTGEPATNIFDKLIGKDFQGELRASGLSLSAQQYNLLNDLTNLKIDGEVPLSSEQKEYILTELMTKEFTRFGVNDVVKLLGVKKERLSGWRLDKKGKPEIHTLKGYRNWRKIFAEAGIDLATLPTETIDCLAKVLTLNTEREGIENTLAFELPELSESVKLLVLDRYKELSQSISTQSWHRFSLKTLHLLIPELMNATSEQNTLLEQFQLKSDVRKRYSEYKKLPTKDVLAEIYNPTVNKTVSQAFKVIDALLVKYGKEQIRYITIEMPRDDNEEDEKKRIKELHAKNSQRKNDSQSYFMQKSGWSQEKFQTTIQKNRRFLAKLLYYYEQDGICAYTGLPISPELLVSDSTEIDHIIPISISLDDSINNKVLVLSKANQVKGQQTPYDAWMDGSFKKINGKFSNWDDYQKWVESRHFSHKKENNLLETRNIFDSEQVEKFLARNLNDTRYASRLVLNTLQSFFTNQETKVRVVNGSFTHTLRKKWGADLDKTRETHHHHAVDATLCAVTSFVKVSRYHYAVKEETGEKVMREIDFETGEIVNEMSYWEFKKSKKYERKTYQVKWPNFREQLKPVNLHPRIKFSHQVDRKANRKLSDATIYSVREKTEVKTLKSGKQKITTDEYTIGKIKDIYTLDGWEAFKKKQDKLLMKDLDEKTYERLLSIAETTPDFQEVEEKNGKVKRVKRSPFAVYCEENDIPAIQKYAKKNNGPLIRSLKYYDGKLNKHINITKDSQGRPVEKTKNGRKVTLQSLKPYRYDIYQDLETKAYYTVQLYYSDLRFVEGKYGITEKEYMKKVAEQTKGQVVRFCFSLQKNDGLEIEWKDSQRYDVRFYNFQSANSINFKGLEQEMMPAENQFKQKPYNNGAINLNIAKYGKEGKKLRKFNTDILGKKHYLFYEKEPKNIIK

SEQ ID NO: 157 - protein, 1054 aa, Staphylococcus lugdunensis
MNQKFILGLDIGITSVGYGLIDYETKNIIDAGVRLFPEANVENNEGRRSKRGSRRLKRRRIHRLERVKKLLEDYNLLDQSQIPQSTNPYAIRVKGLSEALSKDELVIALLHIAKRRGIHKIDVIDSNDDVGNELSTKEQLNKNSKLLKDKFVCQIQLERMNEGQVRGEKNRFKTADIIKEIIQLLNVQKNFHQLDENFINKYIELVEMRREYFEGPGKGSPYGWEGDPKAWYETLMGHCTYFPDELRSVKYAYSADLFNALNDLNNLVIQRDGLSKLEYHEKYHIIENVFKQKKKPTLKQIANEINVNPEDIKGYRITKSGKPQFTEFKLYHDLKSVLFDQSILENEDVLDQIAEILTIYQDKDSIKSKLTELDILLNEEDKENIAQLTGYTGTHRLSLKCIRLVLEEQWYSSRNQMEIFTHLNIKPKKINLTAANKIPKAMIDEFILSPVVKRTFGQAINLINKIIEKYGVPEDIIIELARENNSKDKQKFINEMQKKNENTRKRINEIIGKYGNQNAKRLVEKIRLHDEQEGKCLYSLESIPLEDLLNNPNHYEVDHIIPRSVSFDNSYHNKVLVKQSENSKKSNLTPYQYFNSGKSKLSYNQFKQHILNLSKSQDRISKKKKEYLLEERDINKFEVQKEFINRNLVDTRYATRELTNYLKAYFSANNMNVKVKTINGSFTDYLRKVWKFKKERNHGYKHHAEDALIIANADFLFKENKKLKAVNSVLEKPEIESKQLDIQVDSEDNYSEMFIIPKQVQDIKDFRNFKYSHRVDKKPNRQLINDTLYSTRKKDNSTYIVQTIKDIYAKDNTTLKKQFDKSPEKFLMYQHDPRTFEKLEVIMKQYANEKNPLAKYHEETGEYLTKYSKKNNGPIVKSLKYIGNKLGSHLDVTHQFKSSTKKLVKLSIKPYRFDVYLTDKGYKFITISYLDVLKKDNYYYIPEQKYDKLKLGKAIDKNAKFIASFYKNDLIKLDGEIYKIIGVNSDTRNMIELDLPDIRYKEYCELNNIKGEPRIKKTIGKKVNSIEKLTTDVLGNVFTNTQYTKPQLLFKRGN

SEQ ID NO: 158 - protein, 1096 aa, Eubacterium dolichum
MMEVFMGRLVLGLDIGITSVGFGIIDLDESEIVDYGVRLFKEGTAAENETRRTKRGGRRLKRRRVTRREDMLHLLKQAGIISTSFHPLNNPYDVRVKGLNERLNGEELATALLHLCKHRGSSVETIEDDEAKAKEAGETKKVLSMNDQLLKSGKYVCEIQKERLRTNGHIRGHENNFKTRAYVDEAFQILSHQDLSNELKSAIITIISRKRMYYDGPGGPLSPTPYGRYTYFGQKEPIDLIEKMRGKCSLFPNEPRAPKLAYSAELFNLLNDLNNLSIEGEKLTSEQKAMILKIVHEKGKITPKQLAKEVGVSLEQIRGFRIDTKGSPLLSELTGYKMIREVLEKSNDEHLEDHVFYDEIAEILTKTKDIEGRKKQISELSSDLNEESVHQLAGLTKFTAYHSLSFKALRLINEEMLKTELNQMQSITLFGLKQNNELSVKGMKNIQADDTAILSPVAKRAQRETFKVVNRLREIYGEFDSIVVEMAREKNSEEQRKAIRERQKFFEMRNKQVADIIGDDRKINAKLREKLVLYQEQDGKTAYSLEPIDLKLLIDDPNAYEVDHIIPISISLDDSITNKVLVTHRENQEKGNLTPISAFVKGRFTKGSLAQYKAYCLKLKEKNIKTNKGYRKKVEQYLLNENDIYKYDIQKEFINRNLVDTSYASRVVLNTLTTYFKQNEIPTKVFTVKGSLTNAFRRKINLKKDRDEDYGHHAIDALIIASMPKMRLLSTIFSRYKIEDIYDESTGEVFSSGDDSMYYDDRYFAFIASLKAIKVRKFSHKIDTKPNRSVADETIYSTRVIDGKEKVVKKYKDIYDPKFTALAEDILNNAYQEKYLMALHDPQTFDQIVKVVNYYFEEMSKSEKYFTKDKKGRIKISGMNPLSLYRDEHGMLKKYSKKGDGPAITQMKYFDGVLGNHIDISAHYQVRDKKVVLQQISPYRTDFYYSKENGYKFVTIRYKDVRWSEKKKKYVIDQQDYAMKKAEKKIDDTYEFQFSMHRDELIGITKAEGEALIYPDETWHNFNFFFHAGETPEILKFTATNNDKSNKIEVKPIHCYCKMRLMPTISKKIVRIDKYATDVVGNLYKVKKNTLKFEFD

SEQ ID NO: 159 - protein, 1119 aa, Lactobacillus coryniformis
MGYRIGLDVGITSTGYAVLKTDKNGLPYKILTLDSVIYPRAENPQTGASLAEPRRIKRGLRRRTRRTKFRKQRTQQLFIHSGLLSKPEIEQILATPQAKYSVYELRVAGLDRRLTNSELFRVLYFFIGHRGFKSNRKAELNPENEADKKQMGQLLNSIEEIRKAIAEKGYRTVGELYLKDPKYNDHKRNKGYIDGYLSTPNRQMLVDEIKQILDKQRELGNEKLTDEFYATYLLGDENRAGIFQAQRDFDEGPGAGPYAGDQIKKMVGKDIFEPTEDRAAKATYTFQYFNLLQKMTSLNYQNTTGDTWHTLNGLDRQAIIDAVFAKAEKPTKTYKPTDFGELRKLLKLPDDARFNLVNYGSLQTQKEIETVEKKTRFVDFKAYHDLVKVLPEEMWQSRQLLDHIGTALTLYSSDKRRRRYFAEELNLPAELIEKLLPLNFSKFGHLSIKSMQNIIPYLEMGQVYSEATTNTGYDFRKKQISKDTIREEITNPVVRRAVTKTIKIVEQIIRRYGKPDGINIELARELGRNFKERGDIQKRQDKNRQTNDKIAAELTELGIPVNGQNIIRYKLHKEQNGVDPYTGDQIPFERAFSEGYEVDHIIPYSISWDDSYTNKVLTSAKCNREKGNRIPMVYLANNEQRLNALTNIADNIIRNSRKRQKLLKQKLSDEELKDWKQRNINDTRFITRVLYNYFRQAIEFNPELEKKQRVLPLNGEVTSKIRSRWGFLKVREDGDLHHAIDATVIAAITPKFIQQVTKYSQHQEVKNNQALWHDAEIKDAEYAAEAQRMDADLFNKIFNGFPLPWPEFLDELLARISDNPVEMMKSRSWNTYTPIEIAKLKPVFVVRLANHKISGPAHLDTIRSAKLFDEKGIVLSRVSITKLKINKKGQVATGDGIYDPENSNNGDKVVYSAIRQALEAHNGSGELAFPDGYLEYVDHGTKKLVRKVRVAKKVSLPVRLKNKAAADNGSMVRIDVFNTGKKFVFVPIYIKDTVEQVLPNKAIARGKSLWYQITESDQFCFSLYPGDMVHIESKTGIKPKYSNKENNTSVVPIKNFYGYFDGADIATASILVRAHDSSYTARSIGIAGLLKFEKYQVDYFGRYHKVHEKKRQLFVKRDE

SEQ ID NO: 160 - protein, 1092 aa, Ilyobacter polytropus
MKYSIGLDIGIASVGWSVINKDKERIEDMGVRIFQKAENPKDGSSLASSRREKRGSRRRNRRKKHRLDRIKNILCESGLVKKNEIEKIYKNAYLKSPWELRAKSLEAKISNKEIAQILLHIAKRRGFKSFRKTDRNADDTGKLLSGIQENKKIMEEKGYLTIGDMVAKDPKFNTHVRNKAGSYLFSFSRKLLEDEVRKIQAKQKELGNTHFTDDVLEKYIEVFNSQRNFDEGPSKPSPYYSEIGQIAKMIGNCTFESSEKRTAKNTWSGERFVFLQKLNNFRIVGLSGKRPLTEEERDIVEKEVYLKKEVRYEKLRKILYLKEEERFGDLNYSKDEKQDKKTEKTKFISLIGNYTIKKLNLSEKLKSEIEEDKSKLDKIIEILTFNKSDKTIESNLKKLELSREDIEILLSEEFSGTLNLSLKAIKKILPYLEKGLSYNEACEKADYDYKNNGIKFKRGELLPVVDKDLIANPVVLRAISQTRKVVNAIIRKYGTPHTIHVEVARDLAKSYDDRQTIIKENKKRELENEKTKKFISEEFGIKNVKGKLLLKYRLYQEQEGRCAYSRKELSLSEVILDESMTDIDHIIPYSRSMDDSYSNKVLVLSGENRKKSNLLPKEYFDRQGRDWDTFVLNVKAMKIHPRKKSNLLKEKFTREDNKDWKSRALNDTRYISRFVANYLENALEYRDDSPKKRVFMIPGQLTAQLRARWRLNKVRENGDLHHALDAAVVAVTDQKAINNISNISRYKELKNCKDVIPSIEYHADEETGEVYFEEVKDTRFPMPWSGFDLELQKRLESENPREEFYNLLSDKRYLGWFNYEEGFIEKLRPVFVSRMPNRGVKGQAHQETIRSSKKISNQIAVSKKPLNSIKLKDLEKMQGRDTDRKLYEALKNRLEEYDDKPEKAFAEPFYKPTNSGKRGPLVRGIKVEEKQNVGVYVNGGQASNGSMVRIDVFRKNGKFYTVPIYVHQTLLKELPNRAINGKPYKDWDLIDGSFEFLYSFYPNDLIEIEFGKSKSIKNDNKLTKTEIPEVNLSEVLGYYRGMDTSTGAATIDTQDGKIQMRIGIKTVKNIKKYQVDVLGNVYKVKREKRQTF

SEQ ID NO: 161 - protein, 1156 aa, Ruminococcus albus
MGNYYLGLDVGIGSIGWAVINIEKKRIEDFNVRIFKSGEIQEKNRNSRASQQCRRSRGLRRLYRRKSHRKLRLKNYLSIIGLTTSEKIDYYYETADNNVIQLRNKGLSEKLTPEEIAACLIHICNNRGYKDFYEVNVEDIEDPDERNEYKEEHDSIVLISNLMNEGGYCTPAEMICNCREFDEPNSVYRKFHNSAASKNHYLITRHMLVKEVDLILENQSKYYGILDDKTIAKIKDIIFAQRDFEIGPGKNERFRRFTGYLDSIGKCQFFKDQERGSRFTVIADIYAFVNVLSQYTYTNNRGESVFDTSFANDLINSALKNGSMDKRELKAIAKSYHIDISDKNSDTSLTKCFKYIKVVKPLFEKYGYDWDKLIENYTDTDNNVLNRIGIVLSQAQTPKRRREKLKALNIGLDDGLINELTKLKLSGTANVSYKYMQGSIEAFCEGDLYGKYQAKFNKEIPDIDENAKPQKLPPFKNEDDCEFFKNPVVFRSINETRKLINAIIDKYGYPAAVNIETADELNKTFEDRAIDTKRNNDNQKENDRIVKEIIECIKCDEVHARHLIEKYKLWEAQEGKCLYSGETITKEDMLRDKDKLFEVDHIVPYSLILDNTINNKALVYAEENQKKGQRTPLMYMNEAQAADYRVRVNTMFKSKKCSKKKYQYLMLPDLNDQELLGGWRSRNLNDTRYICKYLVNYLRKNLRFDRSYESSDEDDLKIRDHYRVFPVKSRFTSMFRRWWLNEKTWGRYDKAELKKLTYLDHAADAIIIANCRPEYVVLAGEKLKLNKMYHQAGKRITPEYEQSKKACIDNLYKLFRMDRRTAEKLLSGHGRLTPIIPNLSEEVDKRLWDKNIYEQFWKDDKDKKSCEELYRENVASLYKGDPKFASSLSMPVISLKPDHKYRGTITGEEAIRVKEIDGKLIKLKRKSISEITAESINSIYTDDKILIDSLKTIFEQADYKDVGDYLKKTNQHFFTTSSGKRVNKVTVIEKVPSRWLRKEIDDNNFSLLNDSSYYCIELYKDSKGDNNLQGIAMSDIVHDRKTKKLYLKPDFNYPDDYYTHVMYIFPGDYLRIKSTSKKSGEQLKFEGYFISVKNVNENSFRFISDNKPCAKDKRVSITKKDIVIKLAVDLMGKVQGENNGKGISCGEPLSLLKEKN

SEQ ID NO: 162 - protein, 1101 aa, Akkermansia muciniphila
MSRSLTFSFDIGYASIGWAVIASASHDDADPSVCGCGTVLFPKDDCQAFKRREYRRLRRNIRSRRVRIERIGRLLVQAQIITPEMKETSGHPAPFYLASEALKGHRTLAPIELWHVLRWYAHNRGYDNNASWSNSLSEDGGNGEDTERVKHAQDLMDKHGTATMAETICRELKLEEGKADAPMEVSTPAYKNLNTAFPRLIVEKEVRRILELSAPLIPGLTAEIIELIAQHHPLTTEQRGVLLQHGIKLARRYRGSLLFGQLIPRFDNRIISRCPVTWAQVYEAELKKGNSEQSARERAEKLSKVPTANCPEFYEYRMARILCNIRADGEPLSAEIRRELMNQARQEGKLTKASLEKAISSRLGKETETNVSNYFTLHPDSEEALYLNPAVEVLQRSGIGQILSPSVYRIAANRLRRGKSVTPNYLLNLLKSRGESGEALEKKIEKESKKKEADYADTPLKPKYATGRAPYARTVLKKVVEEILDGEDPTRPARGEAHPDGELKAHDGCLYCLLDTDSSVNQHQKERRLDTMTNNHLVRHRMLILDRLLKDLIQDFADGQKDRISRVCVEVGKELTTFSAMDSKKIQRELTLRQKSHTDAVNRLKRKLPGKALSANLIRKCRIAMDMNWTCPFTGATYGDHELENLELEHIVPHSFRQSNALSSLVLTWPGVNRMKGQRTGYDFVEQEQENPVPDKPNLHICSLNNYRELVEKLDDKKGHEDDRRRKKKRKALLMVRGLSHKHQSQNHEAMKEIGMTEGMMTQSSHLMKLACKSIKTSLPDAHIDMIPGAVTAEVRKAWDVFGVFKELCPEAADPDSGKILKENLRSLTHLHHALDACVLGLIPYIIPAHHNGLLRRVLAMRRIPEKLIPQVRPVANQRHYVLNDDGRMMLRDLSASLKENIREQLMEQRVIQHVPADMGGALLKETMQRVLSVDGSGEDAMVSLSKKKDGKKEKNQVKASKLVGVFPEGPSKLKALKAAIEIDGNYGVALDPKPVVIRHIKVFKRIMALKEQNGGKPVRILKKGMLIHLTSSKDPKHAGVWRIESIQDSKGGVKLDLQRAHCAVPKNKTHECNWREVDLISLLKKYQMKRYPTSYTGTPR

SEQ ID NO: 163 - protein, 1138 aa, Acidothermus cellulolyticus
MGGSEVGTVPVTWRLGVDVGERSIGLAAVSYEEDKPKEILAAVSWIHDGGVGDERSGASRLALRGMARRARRLRRFRRARLRDLDMLLSELGWTPLPDKNVSPVDAWLARKRLAEEYVVDETERRRLLGYAVSHMARHRGWRNPWTTIKDLKNLPQPSDSWERTRESLEARYSVSLEPGTVGQWAGYLLQRAPGIRLNPTQQSAGRRAELSNATAFETRLRQEDVLWELRCIADVQGLPEDVVSNVIDAVFCQKRPSVPAERIGRDPLDPSQLRASRACLEFQEYRIVAAVANLRIRDGSGSRPLSLEERNAVIEALLAQTERSLTWSDIALEILKLPNESDLTSVPEEDGPSSLAYSQFAPFDETSARIAEFIAKNRRKIPTFAQWWQEQDRTSRSDLVAALADNSIAGEEEQELLVHLPDAELEALEGLALPSGRVAYSRLTLSGLTRVMRDDGVDVHNARKTCFGVDDNWRPPLPALHEATGHPVVDRNLAILRKFLSSATMRWGPPQSIVVELARGASESRERQAEEEAARRAHRKANDRIRAELRASGLSDPSPADLVRARLLELYDCHCMYCGAPISWENSELDHIVPRTDGGSNRHENLAITCGACNKEKGRRPFASWAETSNRVQLRDVIDRVQKLKYSGNMYWTRDEFSRYKKSVVARLKRRTSDPEVIQSIESTGYAAVALRDRLLSYGEKNGVAQVAVFRGGVTAEARRWLDISIERLFSRVAIFAQSTSTKRLDRRHHAVDAVVLTTLTPGVAKTLADARSRRVSAEFWRRPSDVNRHSTEEPQSPAYRQWKESCSGLGDLLISTAARDSIAVAAPLRLRPTGALHEETLRAFSEHTVGAAWKGAELRRIVEPEVYAAFLALTDPGGRFLKVSPSEDVLPADENRHIVLSDRVLGPRDRVKLFPDDRGSIRVRGGAAYIASFHHARVFRWGSSHSPSFALLRVSLADLAVAGLLRDGVDVFTAELPPWTPAWRYASIALVKAVESGDAKQVGWLVPGDELDFGPEGVTTAAGDLSMFLKYFPERHWVVTGFEDDKRINLKPAFLSAEQAEVLRTERSDRPDTLTEAGEILAQFFPRCWRATVAKVLCHPGLTVIRRTALGQPRWRRGHLPYSWRPWSADPWSGGTP

SEQ ID NO: 164 - protein, 1187 aa, Bifidobacterium longum
MLSRQLLGASHLARPVSYSYNVQDNDVHCSYGERCFMRGKRYRIGIDVGLNSVGLAAVEVSDENSPVRLLNAQSVIHDGGVDPQKNKEAITRKNMSGVARRTRRMRRRKRERLHKLDMLLGKFGYPVIEPESLDKPFEEWHVRAELATRYIEDDELRRESISIALRHMARHRGWRNPYRQVDSLISDNPYSKQYGELKEKAKAYNDDATAAEEESTPAQLVVAMLDAGYAEAPRLRWRTGSKKPDAEGYLPVRLMQEDNANELKQIFRVQRVPADEWKPLFRSVFYAVSPKGSAEQRVGQDPLAPEQARALKASLAFQEYRIANVITNLRIKDASAELRKLTVDEKQSIYDQLVSPSSEDITWSDLCDFLGFKRSQLKGVGSLTEDGEERISSRPPRLTSVQRIYESDNKIRKPLVAWWKSASDNEHEAMIRLLSNTVDIDKVREDVAYASAIEFIDGLDDDALTKLDSVDLPSGRAAYSVETLQKLTRQMLTTDDDLHEARKTLFNVTDSWRPPADPIGEPLGNPSVDRVLKNVNRYLMNCQQRWGNPVSVNIEHVRSSFSSVAFARKDKREYEKNNEKRSIFRSSLSEQLRADEQMEKVRESDLRRLEAIQRQNGQCLYCGRTITFRTCEMDHIVPRKGVGSTNTRTNFAAVCAECNRMKSNTPFAIWARSEDAQTRGVSLAEAKKRVTMFTFNPKSYAPREVKAFKQAVIARLQQTEDDAAIDNRSIESVAWMADELHRRIDWYFNAKQYVNSASIDDAEAETMKTTVSVFQGRVTASARRAAGIEGKIHFIGQQSKTRLDRRHHAVDASVIAMMNTAAAQTLMERESLRESQRLIGLMPGERSWKEYPYEGTSRYESFHLWLDNMDVLLELLNDALDNDRIAVMQSQRYVLGNSIAHDATIHPLEKVPLGSAMSADLIRRASTPALWCALTRLPDYDEKEGLPEDSHREIRVHDTRYSADDEMGFFASQAAQIAVQEGSADIGSAIHHARVYRCWKTNAKGVRKYFYGMIRVFQTDLLRACHDDLFTVPLPPQSISMRYGEPRVVQALQSGNAQYLGSLVVGDEIEMDFSSLDVDGQIGEYLQFFSQFSGGNLAWKHWVVDGFFNQTQLRIRPRYLAAEGLAKAFSDDVVPDGVQKIVTKQGWLPPVNTASKTAVRIVRRNAFGEPRLSSAHHMPCSWQWRHE

SEQ ID NO: 165 - protein, 1138 aa, Bifidobacterium dentium
MLCRCHRRYRIGIDVGLMSVGLAAIEVDETGFPIRILNIQSVIHDGGIDPQLGKKKSISRKAISGVARRTRRMRRRKVVRLRQLDATLESLGFPIVEPDSLDTWEIWLTRAKLASSYIQDDETRKEDVSIALRHIARHRGWRNPYSNVESLFVDVAPSEQYEELRRKAEEKLGTSLSGNPTSAEIVECILKRQVGEVQLRTRSRKGVNGNAVEKEGLLPTKLMQSDNAAEIRRIFKVQRIDDETGRKLLRAVFKACSPKGSVERRVGRDALAPGLPRALKASLAFQEYRIANVLTNLVISEDGTKRKLTIAEKQRVFGFLSSNETDDITWIDVAEKLGLERRQIQGVGCLTADGEERISSTPPRNITALHIHSAKPVIREKLVAWWKAASPTVRETMVELLSNTVDIDRVREDMDYSSAVAFIDSLGDEELTALDSVDLLSGRAAYSRQTLKQLTERMLNTDDDLHEARKAVFGVDDNWKPPVDAISTSVGNPAVDRVLKIVNRYLLACQKRWRNPQSVQIEHVRESFSSVAKAKETERVQGERARYRNDLRRELCEQEGLNKIRESDIRRWESVQRQNGTCLYCGSPITFRTCEMDHIVPRKGVGSTNTRVNLAAACAACNKLKSNTAFSVWARTEGAANRKVSQRDAIERVKTFIFNKSVPPREQRAFKQAVISRLRQAESDPAIDNRSIESVAWMADELHRRIEAYFNQDADVSGNTPATQVWVFQGRVTALARKASGIEGRIHFAGEWKKTRLDRRHHAVDAAVIAMMNHSAAQTLVERDSLRLSQWITRKPETWKNYPFSEGQKKTRFKEWLDCMNALLDLLNDALDSDRVPVTRCQRMSLGNSQAHAATIRKMKRVELFSPMDADLIRRASTPALYCALTRLPEYSPEKGLPENRGREIVLNGRHIRSTETVDFFASGAAQLMVRNGSAEIGDSIHHMRIYRYRKTGAKSQEYVYGMIRVFQIDLLHASSENLFAVQLPSQSVSVRYGDKNVVQAIQEGRAEYLGHIVPNDEILISYEGVRMKDSEKIGAYANDFSGTASELAQRRHWVVVGSDVSKLALRPSYLSEEGLENSGSESERLSKQTRKVIEGKGWVVAVNILAKYHPVVIRRNALGEPRFRTNSGMPVSWRWDR

SEQ ID NO: 166 - protein, 1084 aa, Corynebacterium diphtheriae
MKYHVGIDVGTFSVGLAAIEVDDAGMPIKTLSLVSHIHDSGLDPDEIKSAVTRLASSGIARRTRRLYRRKRRRLQQLDKFIQRQGWPVIELEDYSDPLYPWKVRAELAASYIADEKERGEKLSVALRHIARHRGWRNPYAKVSSLYLPDGPSDAFKAIREEIKRASGQPVPETATVGQMVTLCELGTLKLRGEGGVLSARLQQSDYAREIQEICRMQEIGQELYRKIIDVVFAAESPKGSASSRVGKDPLQPGKNRALKASDAFQRYRIAALIGNLRVRVDGEKRILSVEEKNLVFDHLVNLTPKKEPEWVTIAEILGIDRGQLIGTATMTDDGERAGARPPTHDTNRSIVNSRIAPLVDWWKTASALEQHAMVKALSNAEVDDFDSPEGAKVQAFFADLDDDVHAKLDSLHLPVGRAAYSEDTLVRLTRRMLSDGVDLYTARLQEFGIEPSWTPPTPRIGEPVGNPAVDRVLKTVSRWLESATKTWGAPERVIIEHVREGFVTEKRAREMDGDMRRRAARNAKLFQEMQEKLNVQGKPSRADLWRYQSVQRQNCQCAYCGSPITFSNSEMDHIVPRAGQGSTNTRENLVAVCHRCNQSKGNTPFAIWAKNTSIEGVSVKEAVERTRHWVTDTGMRSTDFKKFTKAVVERFQRATMDEEIDARSMESVAWMANELRSRVAQHFASHGTTVRVYRGSLTAEARRASGISGKLKFFDGVGKSRLDRRHHAIDAAVIAFTSDYVAETLAVRSNLKQSQAHRQEAPQWREFTGKDAEHRAAWRVWCQKMEKLSALLTEDLRDDRVVVMSNVRLRLGNGSAHKETIGKLSKVKLSSQLSVSDIDKASSEALWCALTREPGFDPKEGLPANPERHIRVNGTHVYAGDNIGLFPVSAGSIALRGGYAELGSSFHHARVYKITSGKKPAFAMLRVYTIDLLPYRNQDLFSVELKPQTMSMRQAEKKLRDALATGNAEYLGWLVVDDELVVDTSKIATDQVKAVEAELGTIRRWRVDGFFSPSKLRLRPLQMSKEGIKKESAPELSKIIDRPGWLPAVNKLFSDGNVTVVRRDSLGRVRLESTAHLPVTWKVQ

SEQ ID NO: 167 - protein, 1195 aa, Elusimicrobium minutum
MQKNINTKQNHIYIKQAQKIKEKLGDKPYRIGLDLGVGSIGFAIVSMEENDGNVLLPKEIIMVGSRIFKASAGAADRKLSRGQRNNHRHTRERMRYLWKVLAEQKLALPVPADLDRKENSSEGETSAKRFLGDVLQKDIYELRVKSLDERLSLQELGYVLYHIAGHRGSSAIRTFENDSEEAQKENTENKKIAGNIKRLMAKKNYRTYGEYLYKEFFENKEKHKREKISNAANNHKFSPTRDLVIKEAEAILKKQAGKDGFHKELTEEYIEKLTKAIGYESEKLIPESGFCPYLKDEKRLPASHKLNEERRLWETLNNARYSDPIVDIVTGEITGYYEKQFTKEQKQKLFDYLLTGSELTPAQTKKLLGLKNTNFEDIILQGRDKKAQKIKGYKLIKLESMPFWARLSEAQQDSFLYDWNSCPDEKLLTEKLSNEYHLTEEEIDNAFNEIVLSSSYAPLGKSAMLIILEKIKNDLSYTEAVEEALKEGKLTKEKQAIKDRLPYYGAVLQESTQKIIAKGFSPQFKDKGYKTPHTNKYELEYGRIANPVVHQTLNELRKLVNEIIDILGKKPCEIGLETARELKKSAEDRSKLSREQNDNESNRNRIYEIYIRPQQQVIITRRENPRNYILKFELLEEQKSQCPFCGGQISPNDIINNQADIEHLFPIAESEDNGRNNLVISHSACNADKAKRSPWAAFASAAKDSKYDYNRILSNVKENIPHKAWRFNQGAFEKFIENKPMAARFKTDNSYISKVAHKYLACLFEKPNIICVKGSLTAQLRMAWGLQGLMIPFAKQLITEKESESFNKDVNSNKKIRLDNRHHALDAIVIAYASRGYGNLLNKMAGKDYKINYSERNWLSKILLPPNNIVWENIDADLESFESSVKTALKNAFISVKHDHSDNGELVKGTMYKIFYSERGYTLTTYKKLSALKLTDPQKKKTPKDFLETALLKFKGRESEMKNEKIKSAIENNKRLFDVIQDNLEKAKKLLEEENEKSKAEGKKEKNINDASIYQKAISLSGDKYVQLSKKEPGKFFAISKPTPTTTGYGYDTGDSLCVDLYYDNKGKLCGEIIRKIDAQQKNPLKYKEQGFTLFERIYGGDILEVDFDIHSDKNSFRNNTGSAPENRVFIKVGTFTEITNNNIQIWFGNIIKSTGGQDDSFTINSMQQYNPRKLILSSCGFIKYRSPILKNKEG

SEQ ID NO: 168 - protein, 1132 aa, Nitratifractor salsuginis
MKKILGVDLGITSFGYAILQETGKDLYRCLDNSVVMRNNPYDEKSGESSQSIRSTQKSMRRLIEKRKKRIRCVAQTMERYGILDYSETMKINDPKNNPIKNRWQLRAVDAWKRPLSPQELFAIFAHMAKHRGYKSIATEDLIYELELELGLNDPEKESEKKADERRQVYNALRHLEELRKKYGGETIAQTIHRAVEAGDLRSYRNHDDYEKMIRREDIEEEIEKVLLRQAELGALGLPEEQVSELIDELKACITDQEMPTIDESLFGKCTFYKDELAAPAYSYLYDLYRLYKKLADLNIDGYEVTQEDREKVIEWVEKKIAQGKNLKKITHKDLRKILGLAPEQKIFGVEDERIVKGKKEPRTFVPFFFLADIAKFKELFASIQKHPDALQIFRELAEILQRSKTPQEALDRLRALMAGKGIDTDDRELLELFKNKRSGTRELSHRYILEALPLFLEGYDEKEVQRILGFDDREDYSRYPKSLRHLHLREGNLFEKEENPINNHAVKSLASWALGLIADLSWRYGPFDEIILETTRDALPEKIRKEIDKAMREREKALDKIIGKYKKEFPSIDKRLARKIQLWERQKGLDLYSGKVINLSQLLDGSADIEHIVPQSLGGLSTDYNTIVTLKSVNAAKGNRLPGDWLAGNPDYRERIGMLSEKGLIDWKKRKNLLAQSLDEIYTENTHSKGIRATSYLEALVAQVLKRYYPFPDPELRKNGIGVRMIPGKVTSKTRSLLGIKSKSRETNFHHAEDALILSTLTRGWQNRLHRMLRDNYGKSEAELKELWKKYMPHIEGLTLADYIDEAFRRFMSKGEESLFYRDMFDTIRSISYWVDKKPLSASSHKETVYSSRHEVPTLRKNILEAFDSLNVIKDRHKLTTEEFMKRYDKEIRQKLWLHRIGNTNDESYRAVEERATQIAQILTRYQLMDAQNDKEIDEKFQQALKELITSPIEVTGKLLRKMRFVYDKLNAMQIDRGLVETDKNMLGIHISKGPNEKLIFRRMDVNNAHELQKERSGILCYLNEMLFIFNKKGLIHYGCLRSYLEKGQGSKYIALFNPRFPANPKAQPSKFTSDSKIKQVGIGSATGIIKAHLDLDGHVRSYEVFGTLPEGSIEWFKEESGYGRVEDDPHH

SEQ ID NO: 169 - protein, 1179 aa, Sphaerochaeta globus
MSKKVSRRYEEQAQEICQRLGSRPYSIGLDLGVGSIGVAVAAYDPIKKQPSDLVFVSSRIFIPSTGAAERRQKRGQRNSLRHRANRLKFLWKLLAERNLMLSYSEQDVPDPARLRFEDAVVRANPYELRLKGLNEQLTLSELGYALYHIANHRGSSSVRTFLDEEKSSDDKKLEEQQAMTEQLAKEKGISTFIEVLTAFNTNGLIGYRNSESVKSKGVPVPTRDIISNEIDVLLQTQKQFYQEILSDEYCDRIVSAILFENEKIVPEAGCCPYFPDEKKLPRCHFLNEERRLWEAINNARIKMPMQEGAAKRYQSASFSDEQRHILFHIARSGTDITPKLVQKEFPALKTSIIVLQGKEKAIQKIAGFRFRRLEEKSFWKRLSEEQKDDFFSAWTNTPDDKRLSKYLMKHLLLTENEVVDALKTVSLIGDYGPIGKTATQLLMKHLEDGLTYTEALERGMETGEFQELSVWEQQSLLPYYGQILTGSTQALMGKYWHSAFKEKRDSEGFFKPNTNSDEEKYGRIANPVVHQTLNELRKLMNELITILGAKPQEITVELARELKVGAEKREDIIKQQTKQEKEAVLAYSKYCEPNNLDKRYIERFRLLEDQAFVCPYCLEHISVADIAAGRADVDHIFPRDDTADNSYGNKVVAHRQCNDIKGKRTPYAAFSNTSAWGPIMHYLDETPGMWRKRRKFETNEEEYAKYLQSKGFVSRFESDNSYIAKAAKEYLRCLFNPNNVTAVGSLKGMETSILRKAWNLQGIDDLLGSRHWSKDADTSPTMRKNRDDNRHHGLDAIVALYCSRSLVQMINTMSEQGKRAVEIEAMIPIPGYASEPNLSFEAQRELFRKKILEFMDLHAFVSMKTDNDANGALLKDTVYSILGADTQGEDLVFVVKKKIKDIGVKIGDYEEVASAIRGRITDKQPKWYPMEMKDKIEQLQSKNEAALQKYKESLVQAAAVLEESNRKLIESGKKPIQLSEKTISKKALELVGGYYYLISNNKRTKTFVVKEPSNEVKGFAFDTGSNLCLDFYHDAQGKLCGEIIRKIQAMNPSYKPAYMKQGYSLYVRLYQGDVCELRASDLTEAESNLAKTTHVRLPNAKPGRTFVIIITFTEMGSGYQIYFSNLAKSKKGQDTSFTLTTIKNYDVRKVQLSSAGLVRYVSPLLVDKIEKDEVALCGE

SEQ ID NO: 170 - protein, 1512 aa, Fibrobacter succinogenes
MKKILGLDLGTNSIGWAVVNADEITRDDGSRYLKPNGISAAGSRIIPMSADILGDFEKGNSISQTAERTRMRMARRLHERALLRRERLLRVLNLLDFLPKHFADKIDRYGKFTDDSEPKLAWRKNTEGKYEFIFQDAFNEMLAEFKDKQPEIVEEGKKIPYDWTIYYLRKKALEKALSKEELSWILLQFNQKRGYYQLRGEEEEIPQDKKIEYLAQKVVKVEATDQKKGDDVWYNVYLENGMIYRRTSKAPLDWEGKVKEFIVTTEVENDGETPKKDKEGNIKRSFRAPKEDDWTLLKKKTEADIENSHKTVGCYIYDSLLNNPKQKIIGKLVRTVERKFYKEELTQILKKQVELIPELRDDNLYKQCIEELYPINEAHRNTIAKTDFANLFINDILFYQRPLKSKKSQIDNCPYEERIFIDSKTGEKKKVPVKCIAKSNPLFQEFRLWQFIQNLRIYQREKEIDGKLLTDIDITSECLKSEEDYVRLFDWLNDRETIEQEDLLKHLFNTKKSKNKENPYRWNYVEDKVYPCNETRATILKGFSKCGINASVLSPELEMALWHILYSVEDKKEIETALTHFAQKQGWNDDFAKVFSKAKPFKKDYGSYSEKAIKKLLSLMRMGKYWNQDNIDKNTLDRIDKIINGEYDEKISNRVRDNAINLKDISDFRGLPVWLACYIVYDRHSEAKDCTKWNSPEEIDSYLKKFKQHSLRNPIVEQVVTETLRTVRDIWIQEEQIDEIHLELGRDLKNPADKRKKMSENILKNENTNLRIKAMLMEFMNPSMGIENVRPYSPSQQDILRIYEENALDNLTKDDKDFDFISKISKQAQPSKTDIIRYKCWLEQKYRSPYTGKTISLSKLFTPAYEIEHVIPQSLYFDDSFSNKVICEAEVNKLKDRQLGYKFIAEHHGEKVQLSQGEVVEILSVDAYEKFVKENYANNRIKMKKLLMESIPDEFIERQLNDSRYISKVVKGLLSNIVREKIDDENYEPEAVSKNLISCNGAITDRLKKDWGMNDVWNSIILPRFIRMNQITGKDCFTTTNAEGHLIPQMPLELQKGFNKKRIDHRHHAMDAIVIACTTRDHVNLLNNEAAHSKFNATRYQLQRKLRRFEKAVIDGKEREVAKEFLKPWDSFSSDSKNILENIIVSFKQNQRVINKTTNAFLHFDENGKKTFIKQGKGDSWAIRKSMHKDTVFGEINLRKVRSVSLNEAIKVPERVLNKKIKEKILELKNNKIDAKNIKKYIEENHTGGYGIDSSKIDVFYFTKETKERFFATRKTLDTSFNQAKIKDSIADSGIQKILLAHLKSKNGDAEQAFSPDGIDEMNKNIVELNNGKFHQPILKVRVYEKADKFAVGQKGNKKVKFVEAAKGTNLFFAIFEKDGKRSYLTIPLNVMIDCQKQYGNQWKNNIEAYLKEKELVEKDVKLQFILSPNDLVYLPTEGSIDKKRIYKVVSFTNNRLYAIPYAIAKSIVDKNEFTQLNKIEFTDNKESIKDACVPVIIDRLGNVIEFNGKRL

SEQ ID NO: 171 - protein, 1436 aa, Bacteroides fragilis
MKRILGLDLGTNSIGWALVNEAENKDERSSIVKLGVRVNPLTVDELTNFEKGKSITTNADRTLKRGMRRNLQRYKLRRETLTEVLKEHKLITEDTILSENGNRTTFETYRLRAKAVTEEISLEEFARVLLMINKKRGYKSSRKAKGVEEGTLIDGMDIARELYNNNLTPGELCLQLLDAGKKFLPDFYRSDLQNELDRIWEKQKEYYPEILTDVLKEELRGKKRDAVWAICAKYFVWKENYTEWNKEKGKTEQQEREHKLEGIYSKRKRDEAKRENLQWRVNGLKEKLSLEQLVIVFQEMNTQINNSSGYLGAISDRSKELYFNKQTVGQYQMEMLDKNPNASLRNMVFYRQDYLDEFNMLWEKQAVYHKELTEELKKEIRDIIIFYQRRLKSQKGLIGFCEFESRQIEVDIDGKKKIKTVGNRVISRSSPLFQEFKIWQILNNIEVTVVGKKRKRRKLKENYSALFEELNDAEQLELNGSRRLCQEEKELLAQELFIRDKMTKSEVLKLLFDNPQELDLNFKTIDGNKTGYALFQAYSKMIEMSGHEPVDFKKPVEKVVEYIKAVFDLLNWNTDILGFNSNEELDNQPYYKLWHLLYSFEGDNTPTGNGRLIQKMTELYGFEKEYATILANVSFQDDYGSLSAKAIHKILPHLKEGNRYDVACVYAGYRHSESSLTREEIANKVLKDRLMLLPKNSLHNPVVEKILNQMVNVINVIIDIYGKPDEIRVELARELKKNAKEREELTKSIAQTTKAHEEYKTLLQTEFGLTNVSRTDILRYKLYKELESCGYKTLYSNTYISREKLFSKEFDIEHIIPQARLFDDSFSNKTLEARSVNIEKGNKTAYDFVKEKFGESGADNSLEHYLNNIEDLFKSGKISKTKYNKLKMAEQDIPDGFIERDLRNTQYIAKKALSMLNEISHRVVATSGSVTDKLREDWQLIDVMKELNWEKYKALGLVEYFEDRDGRQIGRIKDWTKRNDHRHHAMDALTVAFTKDVFIQYFNNKNASLDPNANEHAIKNKYFQNGRAIAPMPLREFRAEAKKHLENTLISIKAKNKVITGNINKTRKKGGVNKNMQQTPRGQLHLETIYGSGKQYLTKEEKVNASFDMRKIGTVSKSAYRDALLKRLYENDNDPKKAFAGKNSLDKQPIWLDKEQMRKVPEKVKIVTLEAIYTIRKEISPDLKVDKVIDVGVRKILIDRLNEYGNDAKKAFSNLDKNPIWLNKEKGISIKRVTISGISNAQSLHVKKDKDGKPILDENGRNIPVDFVNTGNNHHVAVYYRPVIDKRGQLVVDEAGNPKYELEEVVVSFFEAVTRANLGLPIIDKDYKTTEGWQFLFSMKQNEYFVFPNEKTGFNPKEIDLLDVENYGLISPNLFRVQKFSLKNYVFRHHLETTIKDTSSILRGITWIDFRSSKGLDTIVKVRVNHIGQIVSVGEY

SEQ ID NO: 172 - protein, 1426 aa, Capnocytophaga ochracea
MKNILGLDLGTTSIGFAHIVEDENKEKSEIKELGVRIVSLTTDEQSDFEKGKSITTNANRTLKHGARLNLDRYQQRRKYLIDLLQKANLITPSSILAENGKNTTHSTWQLRAKAVTERIEKEEFARILLAINKKRGYKSSRKAKTEDEGQAIDGMAIAKRLYDENLTPGQLSLQLLQQNKKLLPDFYRSDLQKEFDLVWNFQKQFYPDILTDIFYKELQGKGKDATSKAFSKRYHFDTTENKGSKESVRLQAYQWRAEAISKQLSKEEVAYVLTEINNNLNNASGYLGAISDRSKELYFNRQTVGQYLYAKLQENRHNSLKNKVFYRQDYLDEFERIWETQASFHKELTDELKKQIRDVVIFYQRKPKSQKGLISFCEFESKEIEIEKDGKTITKNIGARVVPKSSPLFQEFKIWQILNNVICKRKGIRKKKISAKTTQLDLLNESSQTIFSLDMECKQLLFDELNLKGDLKSDKVLKLLGYSPQEWEINYNQLEGNRTQKALYEAYLKIVEMEAHDVKDILQIKSAKDDWSLDESPLSASEIREKVKAIFQTLGICTKILYFDPLLPVKEFEEQDSYQLWHLLYSYESDDSTSGNETLYRILEKKYAFKREHARILANVALQDDYGSLSTKAIRKIYPNIKENQYSTACEKAGYKHSKLSLTTEELEARELKNIIPLLKKNALRNPVVEKILNQMINVVNALIEKNSERDAEGKITKYFHFDEIRIELARELKKNAQKRYEMTQNINKAKLEHQKISEILQKEFGIKNPTKSDIIRYRLYQELEHNGYKELYTNAPIARDMLFSKNIEIEHIVPKARVFDDSFSNKTLTFHRINSDKGEYTAFDYITSLNSEEELNQYLTRVENAYKTKSISPTKYKNLLKKASEIGDDFINRDLRDTQYIAKKAKEILFQVTKNVLSTSGSITDRLREDWGLVDVMKELNMPKYQSLGLTEVEERKDGNKVTVIKNWTKRNDHRHHAMDALTVAFTKPSYIQYLNHLNARKDENNKNYSVILAIEEKETIKVPTNNGKNKRVFIEPIPNFRQVAKKHLEEIFISHKAKNKVVTKNTNKPAGTDKQQITLTPRGQLHKETIYGKYQYYINKEEKIGVKFDERTIAKVSNPVYREALLKRLQANDNDPKKAFAGKNALSKNPIYLDESKTKTLPEKVNLTYLEEDFSIRKDISPDNFKDLKSIEKVIDQGVKRILIKRLQAYDNDPKKAFVDLEKNPIWLNKEKGIAIKRVTISGVNNAQPLHIGKDHLGKTTLNKEGKEIPVDYVSTGNNHHVAIYRDKEGNLQEQIVSFFDAVVRAQQGIPIIDKTYKQAEGWQFLFTMKQNEMFVFPNATTGFNPAEIDLLDPKNKKLISPNLFRVQKIATKDYFFRHHLETNVETDNILKNVTWKREGLSGLKDIVKVRINHLGDIVSIGEY

SEQ ID NO: 173 - protein, 1066 aa, Rhodopseudomonas palustris
MSERVVRRILGIDLGIASCGWGVVDISGAGGGIIATGVRCFDAPLIDKTGEPKSATRRTARGQRRIVRRRRQRMNGVRRLLCEFGLLPDPRPDALNQAMRRISTASAAAQVTPWTLRAAAHQRLLSNEELAVVLGHIARHRGFRSNAKNEAGANAADETSKMKKAMEATREGLAKYHAFGDMIANDPKFANRKRNRDKDYSHTAKRSDLEDEVRAILRAQLRFGSAAATETLAQTFADVAFFQRPLQDSEDRVGDCPFEPGQKRAARRAPSFELFRFLSRLANLKLAVGRSPERRLTAEEIALAAKGFGETKKTITFKSLREALDLDPNARFSGIGKDKEASLDVVARTGGAAYGTKTLKDALGDAPWRSLSRTPETLDRIAEILSFREDITSIRNGLEDLGLDSLVVEALMQAAANGDFKEFTRAGHISARAARNIIPGLREGLVYSEACARVGYDHAARLSVPLDQVGSPVTRKALSEALKQVRAVAREYGPIDYFHIELARSVGKSAEERKQLTDGIEARNVEKAKRRKQAEEHLGRAPSDDELLRYELAKEQNFKCIYSGDAIDPAGVAANDTRYQVDHILPWSRFGDDSYLNKTLCTARSNQNKRGRTPFEWFEADKTDVEWMEYVARVENLQEVKGRKKRNYSIKDAAAIEDKFKARNLTDTQWATRLLADELSRMFPPRECERAICGRADGGNDGLTIVEERRVFTRPGAITSKLRRAWGLEGLKKQDGKRVEDDRHHAVDALVLAATTESLLQRLTVEVQRREREGRPDDIFHCAEPWRGFRADVRRTVYGSETMPGIFVSRAERRRARGKAHDATIKQIREIEGERLVFERKPVEKLTDKDLEKIPIPKPYGQVSDPKRLRDELVESLRAWIAAGKPKDRPPLSPKGDVIRKVRIQTNDKVSVEINGGTVDRGDMARVDVFRKKNKKAVWEYYVVPIYPHQIVALNDPPDRAVIAYAEDKDWKEIDSSYEFLWSLFGLSYVEISKANGECIDGYFRGLHRGTGAASVCKHISLGKDATVSGIGLKTLASFKKFTIDRLGRKFEIPREVRTWRGEACT

SEQ ID NO: 174 - protein, 1425 aa, Prevotella micans
MIQKIFGLDLGTNSIGSSVRNLELGENLTEQLEFFSSDIFGSSVSKNSNGREYSLAGNRSAHRRSRGLNEARRRKLWATLDLLIEHGLCPMSPDSLMQWRTYDKQKGLYRQYPIEDKDFNAWIMLDFNGDGKPDYSSPYQLRRELVVRQFDFDQPIERYKLGRALYHIAQHRGFKSSKGETIADQEKNEKKPIAEEGADIANEMKASETKLSKGLVAYMQENHLKTVGEAFAKLEDERVRIRNNESYRAIRSQYQDEIKEIFTYQKKLSVESELYERLTSEKKGVGTIFYKRPLRSQRGNVGKCTLERNKPRCPIGRPEFEEFRAWTLINNIKIRETAGEPYKQLPIKLRQELLKDCFLSKVKADFKFEDIRKYIEKRLGLSFSNDDKTINYKDSVSIAACPVTVRMKKLLGENWANCRIDGEKRRQAHGKNNNNEHIVSYTEEDIWHVCYNAEDPEEVSNFARKALHWDENKIKELVRLWTSIPQGYAMLSLKAIRNINRMLLLGLKYSDAVLLAKLPDIVPVSDEDILAITKEFLQLEDKLNQEKQINNIVNSLIANYKSKLEENRFADHNYQYQLGEGDDEDINTQIKSHIGAKLWVQIGADEQTKIFQAVRSKYQDFFKSYKRKFVESPKLGELLVAFLTEKFPNVKSKQWERLYHPSQIAIYRPIPVDNDRSKLRLGNPNIGAIKNPTVMRVLNTLRRRVNQLLDDGVISPDETRVVVETARELNDANTKWALDRYNRIRRDENEKIRKILKELNPTTNSISEQDIDKARYIFEQCETDFYTDGKVPYYNKDIKKYKLWLEQGGQCLYTGQTINLTNLFNPNAFDMEHTIPKSISFDNSDQNLTLCESYYNRFIKKNNIPTDMPNYDKDVTINGKEYTAIKPRLQRWKERVDRLSRNVDFWKGQARRAQDKDRKDECIREKHLWDMELAYWKGKLERFTMTDVTDGFKNSQLVDTRVITRHAVLYLKSIFNHVEVQRGETTAEFRKILGLQSIDEKKDRSLHSHHAIDATMLTVIPSAAKRDRMLELFYKIEETKKALKNYNDNNKTGLNLELKGLEEKLDKEKKDCRVGRRVNDLDRFINENIIVSHHTKDQALTPAHRRLRKRGKIVGGKEHPRWQTGDSLRGEIHKASYYGAITQFAKDANGKVLMKDGQAQIDPTIYYVIRRELKYKRSTQDSGFTNWEDLEKVIVDTDLFGLMKGQFPEGTSFKDACEQGFYMIKKGKNGEGDVKTHRIRHVRCKAVKTALRIKEQTYKSSKDYKQFFYAAVGDLYVMCYYTDGKKRDFKIYSLYDISNHRKSGTEDIPKFITDKKGNHLPLDYKLRTGDMVLLYKDNPEELKDLDQVNLKRRLYKVNRFESEGLIILLTHHLSTTTERGCSIGKIENYQNLPTAIRCGIKTIKFLIMGKHRDFVIRNGNIEFKH

SEQ ID NO: 175 - protein, 1204 aa, Prevotella ruminicola
MERILGIDTGTNSLGWAIVDKDENQYHLVAKGTNIFSEGVKIEKGIESSKAAERTEHRSVRKHYWRRKIRKIRLLTILSDNDLCPRLKHEQLRQWRLKKVYPTDDTFMEWQRTEDKAQVNPYKFRYICLTQKLDLSDITQRFILGRALYHLNQRRGFLSNRKEATKESEGTVKEGISSLSKDMKDSGCEYLGEYFYQLYQQGKKIRNHYTARKEHYLKEFKAICSKQELDDALIEKLEKAIFDQRPLKSQKGQVGTCTFEKGKSRCPSSHPLYEDFRMYSFINNIKVQVDTLYDKGERSLTDEEKQLIIPLFKRKSKRTFPFEDIAKKIAGKNNYCYIKSNEEKAYKFNYQMDTQVSGSPVNAQLEEIFGEDWLSSVCEVYTLANNKSRFQIMNDVWHVLFFYDDEDKLKEFAKDRLQLDDELAEKFSKISIPNDYAALSLKAIRKIMPYLRDYGLIYSEAVFLANLVDVLPQHVWGIKEMREAAIENVIDVMHSYDKNNIDGITLEGCVKTFLKERYQVSDDNLKKLYHPSMLDPYPRQRPNDEGVFQLGSPRISSVKNPMAMHSLFRLRKVVNLMLKKGYITPDTKVHIEFSRDLNDANKRWAIQTWQRENEKERERCRKEIEKYIASPSDTDILKYQLWEEQNHKCLYTGDEIRITDFLGDNPKYDIEHTIPRSAGGDSTKMNLTLCSSRFNRDEKKTKLPAELVNHDEILERISNWKEKYEDIDKQIRKISTKGATSKEDKDSKIRRRHYLILQRDYWRGKYQRFTMTEVPEGFSRRQGTDISVISRYARMYLKSVFKQVYIVKGIATSDFRKMWGIQDEYAKKERVNHVHHCIDAITIACIGKAEYDKLADYRHQYDDYLFQGKTKPTFDKPWPSFVIDIKHIQDELLIAHYAKDNLEKFTKKNLRGKDGRIIRDKFGNKLQMKGDTSRNSLHNDKFYGAINHEGEIKYVYRTNIEALDAKSIGNIVDPTVRSIIESAIAIHGSLKAAINKGIWMNEEKHIPIKKVRVFRNDVKKPIELKDQRDLSDKDYKQHYYVTNDGNYMMLIFSKLNNKGREIRQHVVINSLEATEVIKSHKRSQVGKVVWESYYSKEGFDLIYKLKSGTMILLYENNRDEVWDLDIRNLQKRLYIITKMKYDGRIYMMHHQEAREKKDLEEKSGSFKINEDYRPLIVNSYNQFNALVQDLDFEINDLGEIRRLI

SEQ ID NO: 176 - protein, 1535 aa, Flavobacterium columnare
MTKILGLDLGTNSIGWAIRDTENEGINQILDKGARIFSEGVKSENGKEISRAAERTAYRSARKIKYRRKLRKYETLKVLSINGMCPLSVEEVEQWKKSGFKEYPLNPEFLDWLRTNEDKNINPYLFRDKASKQKVTLFELGRALYHIAQRRGFLSNRLDQSAEGVFEEHNPQIQNLIEDLDSSNTILNELKEYYINLGIIDETEKSGFKKDLDEGEKKLKSLYNSLVAITKKNANDIETCKQELIARLNKKEDLGKVKGKIKDISQAMLDRNFKTLGQYFFSLYNKERIRNQYTSREEHYLEEFIIICQTQGIEGINTNEKLPEKKFTGLAKDLYRAIFFQRPLKSQKGLIGKCSFEKNKSRCAVSHPDYEEFRMWSYLNTIKIGTQSEKTLRFLTLEEKLKLVPKFYRKSDFNFEVLAKELVEKGASFGYYKSSKKNEFFYWFNYKPTDSVSACVVSASLENAIGKDWKIKTFEYQTRNTEKNEVTKSVDYKDLWHLLSVATSDTYLYDFAIEKLKLEPKNAKAFSKTKLKKDFASLSLAAIAKILPYLKQGLLYSHAVFMANIENIVDADIWKDEEQQKFIQSKIVELVDNYIVEKSKLELINGLLKIYNTEDKEGRKVYYSKEAESLFEADLRKKLVPFYKANIIIEEHEQEIIFQDLFPILMDQLKKQEFIKIGRLDKQIEAFLEGENEEGQIFCNHTDKLKKLYHPSDIEVFKKKTIKDEWGNEKVVLGSPLTTSIKNPMAMRALHQLRKVLNTLIANDQIDEDTRIHIEMARELNDANKRKGIQDFQNENKKFREEAIKEIKKLYLEECHKDVNPTEDDILRYQLWLEQGKCEIYEEGNNISICDIIGSNPSYDIEHTIPRSISQDNSQMNKTLCSLKFNRSIKKQKMPVELSNYNDILPRIAHWKKEAEELTRQIETISRSIKSAATKVAKDKNIRKRHYLTLKRDYILGKYERFTWEEPKVGFKNSQIPDTGIITKYAQAYLKSYFKRVESVKGGAVAEFRKLWGIQESFIDENWWKHYKDKDRDKHTHHTIDAITIACMPKDKYDLLAHAWRLEDEQDKKAAKVLIEQAKPWKTFKEDIEKIETEILVSHFTPDNVKKQSKSIIKNRGKKVYVLKNELPVNFKNKIEGKDYFKLKFDSKILYKIPKKKEKQTDTFYEELPKNYLNGVEGKDYFKINTTGKTFYKIPIFNQGDTIRGSLHQETTYGAIKLPDIDIETKKPLHTDKGGFILKKDIKGNEIVFFVVRKEISKISENDVQNIVDNVVRKKIENAIANSLITFKIVKKKKVAVIKEGVTIWMREPNIEKGIEGIPIKKVRIITNSVKNPIEIKVHSPLSKSRHKHKQKVYGQNDENYAMALYELDGKREFELINNFNLAKLLKQSQSYYPLHKEKEIKGKKILVPIEKRNNKDVILKRGQQVVFYDKTVENPKDISEIIDFRERIYIIEGLTIQRQKDKKTSKVNEYGIIQLRHFKEARKSEEISKDNFKPDGEFKINENKPTRKMNHNQFTAFVEGIDFKVLPSGKFQKI

SEQ ID NO: 177 - protein, 1052 aa, Aminomonas paucivorans
MIGEHVRGGCLFDDHWTPNWGAFRLPNTVRTFTKAENPKDGSSLAEPRRQARGLRRRLRRKTQRLEDLRRLLAKEGVLSLSDLETLFRETPAKDPYQLRAEGLDRPLSFPEWVRVLYHITKHRGFQSNRRNPVEDGQERSRQEEEGKLLSGVGENERLLREGGYRTAGEMLARDPKFQDHRRNRAGDYSHTLSRSLLLEEARRLFQSQRTLGNPHASSNLEEAFLHLVAFQNPFASGEDIRNKAGHCSLEPDQIRAPRRSASAETFMLLQKTGNLRLIHRRTGEERPLTDKEREQIHLLAWKQEKVTHKTLRRHLEIPEEWLFTGLPYHRSGDKAEEKLFVHLAGIHEIRKALDKGPDPAVWDTLRSRRDLLDSIADTLTFYKNEDEILPRLESLGLSPENARALAPLSFSGTAHLSLSALGKLLPHLEEGKSYTQARADAGYAAPPPDRHPKLPPLEEADWRNPVVFRALTQTRKVVNALVRRYGPPWCIHLETARELSQPAKVRRRIETEQQANEKKKQQAEREFLDIVGTAPGPGDLLKMRLWREQGGFCPYCEEYLNPTRLAEPGYAEMDHILPYSRSLDNGWHNRVLVHGKDNRDKGNRTPFEAFGGDTARWDRLVAWVQASHLSAPKKRNLLREDFGEEAERELKDRNLTDTRFITKTAATLLRDRLTFHPEAPKDPVMTLNGRLTAFLRKQWGLHKNRKNGDLHHALDAAVLAVASRSFVYRLSSHNAAWGELPRGREAENGFSLPYPAFRSEVLARLCPTREEILLRLDQGGVGYDEAFRNGLRPVFVSRAPSRRLRGKAHMETLRSPKWKDHPEGPRTASRIPLKDLNLEKLERMVGKDRDRKLYEALRERLAAFGGNGKKAFVAPFRKPCRSGEGPLVRSLRIFDSGYSGVELRDGGEVYAVADHESMVRVDVYAKKNRFYLVPVYVADVARGIVKNRAIVAHKSEEEWDLVDGSFDFRFSLFPGDLVEIEKKDGAYLGYYKSCHRGDGRLLLDRHDRMPRESDCGTFYVSTRKDVLSMSKYQVDPLGEIRLVGSEKPPFVL

SEQ ID NO: 178 - protein, 1173 aa, Rhodospirillum rubrum
MRPIEPWILGLDIGTDSLGWAVFSCEEKGPPTAKELLGGGVRLFDSGRDAKDHTSRQAERGAFRRARRQTRTWPWRRDRLIALFQAAGLTPPAAETRQIALALRREAVSRPLAPDALWAALLHLAHHRGFRSNRIDKRERAAAKALAKAKPAKATAKATAPAKEADDEAGFWEGAEAALRQRMAASGAPTVGALLADDLDRGQPVRMRYNQSDRDGVVAPTRALIAEELAEIVARQSSAYPGLDWPAVTRLVLDQRPLRSKGAGPCAFLPGEDRALRALPTVQDFIIRQTLANLRLPSTSADEPRPLTDEEHAKALALLSTARFVEWPALRRALGLKRGVKFTAETERNGAKQAARGTAGNLTEAILAPLIPGWSGWDLDRKDRVFSDLWAARQDRSALLALIGDPRGPTRVTEDETAEAVADAIQIVLPTGRASLSAKAARAIAQAMAPGIGYDEAVTLALGLHHSHRPRQERLARLPYYAAALPDVGLDGDPVGPPPAEDDGAAAEAYYGRIGNISVHIALNETRKIVNALLHRHGPILRLVMVETTRELKAGADERKRMIAEQAERERENAEIDVELRKSDRWMANARERRQRVRLARRQNNLCPYTSTPIGHADLLGDAYDIDHVIPLARGGRDSLDNMVLCQSDANKTKGDKTPWEAFHDKPGWIAQRDDFLARLDPQTAKALAWRFADDAGERVARKSAEDEDQGFLPRQLTDTGYIARVALRYLSLVTNEPNAVVATNGRLTGLLRLAWDITPGPAPRDLLPTPRDALRDDTAARRFLDGLTPPPLAKAVEGAVQARLAALGRSRVADAGLADALGLTLASLGGGGKNRADHRHHFIDAAMIAVTTRGLINQINQASGAGRILDLRKWPRTNFEPPYPTFRAEVMKQWDHIHPSIRPAHRDGGSLHAATVFGVRNRPDARVLVQRKPVEKLFLDANAKPLPADKIAEIIDGFASPRMAKRFKALLARYQAAHPEVPPALAALAVARDPAFGPRGMTANTVIAGRSDGDGEDAGLITPFRANPKAAVRTMGNAVYEVWEIQVKGRPRWTHRVLTRFDRTQPAPPPPPENARLVMRLRRGDLVYWPLESGDRLFLVKKMAVDGRLALWPARLATGKATALYAQLSCPNINLNGDQGYCVQSAEGIRKEKIRTTSCTALGRLRLSKKAT

SEQ ID NO: 179 - protein, 1035 aa, Candidatus Puniceispirillum
MRRLGLDLGTNSIGWCLLDLGDDGEPVSIFRTGARIFSDGRDPKSLGSLKATRREARLTRRRRDRFIQRQKNLINALVKYGLMPADEIQRQALAYKDPYPIRKKALDEAIDPYEMGRAIFHINQRRGFKSNRKSADNEAGVVKQSIADLEMKLGEAGARTIGEFLADRQATNDTVRARRLSGTNALYEFYPDRYMLEQEFDTLWAKQAAFNPSLYIEAARERLKEIVFFQRKLKPQEVGRCIFLSDEDRISKALPSFQRFRIYQELSNLAWIDHDGVAHRITASLALRDHLFDELEHKKKLTFKAMRAILRKQGVVDYPVGFNLESDNRDHLIGNLTSCIMRDAKKMIGSAWDRLDEEEQDSFILMLQDDQKGDDEVRSILTQQYGLSDDVAEDCLDVRLPDGHGSLSKKAIDRILPVLRDQGLIYYDAVKEAGLGEANLYDPYAALSDKLDYYGKALAGHVMGASGKFEDSDEKRYGTISNPTVHIALNQVRAVVNELIRLHGKPDEVVIEIGRDLPMGADGKRELERFQKEGRAKNERARDELKKLGHIDSRESRQKFQLWEQLAKEPVDRCCPFTGKMMSISDLFSDKVEIEHLLPFSLTLDDSMANKTVCFRQANRDKGNRAPFDAFGNSPAGYDWQEILGRSQNLPYAKRWRFLPDAMKRFEADGGFLERQLNDTRYISRYTTEYISTIIPKNKIWVVTGRLTSLLRGFWGLNSILRGHNTDDGTPAKKSRDDHRHHAIDAIVVGMTSRGLLQKVSKAARRSEDLDLTRLFEGRIDPWDGFRDEVKKHIDAIIVSHRPRKKSQGALHNDTAYGIVEHAENGASTVVHRVPITSLGKQSDIEKVRDPLIKSALLNETAGLSGKSFENAVQKWCADNSIKSLRIVETVSIIPITDKEGVAYKGYKGDGNAYMDIYQDPTSSKWKGEIVSRFDANQKGFIPSWQSQFPTARLIMRLRINDLLKLQDGEIEEIYRVQRLSGSKILMAPHTEANVDARDRDKNDTFKLTSKSPGKLQSASARKVHISPTGLIREG

SEQ ID NO: 180 - protein, 1068 aa, Verminephrobacter eiseniae
MNKAVAYRLALDLGSTSLGWAIFRLNEAREPTAIIRAGVRIFSDGRNANSEPLAVHRRVARAMRRRRDRLLKRKKRMHDQLVQHGFFPAEVAERKELERLNPYQLRAKGLHEALTPGEFARALFHINQRRGFKSNRKTDRKDNDSGALKQAISELRKRIQDSDCATAGEWFWKERMQQKPEGVRGQWVRARYRKTPSTTDEGKKRIGYDLYVDRAMVEQEFDALWAAQAALQPGLFTEAARAELKDTLLYQRDLRPVKPGRCTLLPAEERAPLALPSTQRFRILQEVNNLRLLDEALREVPLNLAQRDAVVSALEGKKELSFAAIRKLLTLSGKFNLEDEKRAELKGNATSVILARKDLFGDAWAGFDAAVQDEIVWRLVSQESEGALIAWLQQHTGVDGVCAEAIVNTRLPDGYGRLSRKALERIVPALQREVCTYDKAVQAAGFAHHSDLGFDFDYAEDEVQQVGEHTIASTGEVQAQYAFKQLPYYGKALQRHVAFGSGDAKDHEEKCYGKIANPTVHIGLNQVRTVVNALIRRYGHPTEVVVELARDLKQSREQKQQTQREQADNQKRNEDIRKRIAPILETSPERVRDRDIKKWILWEELNKKDIADRHCPYSGERISATMLLSEAVEIEHILPFSRTLDDSLNNRTVAMRRANRIKGDRTPWEARADFEAQGWRYEAILQRAEGMPPRKRYRFAEDGYQRWLGKDRNFLARALNDTSYLSRLAANYLRLVCPQGVRVIPGQMTDKLRGKFGLNSVLGLDGKKNRNDHRHHAVDACVIGVTDQGLMQRFANASKQARENGLTRLVQDMLLPWWPSYYDHVERAVRHIRVSHRPDHGFEGAMMKGTAHGIREDGIREDGRIKQRPKAKGSADHKTITLIPIDEPRQLARHGVDAEGKPLPYKGYASGSNYCIEITKNGKGKWEGQVISTFDAYRIKAAADAAARAGQVISTVEADSIVRKSGWERLRGAQSQNGQPLVMRLVIGDSVRMEVDGRDEVMRVVKMSGKEMVFAPVREANVDKRNNMPDEQDPFTYTYKRADQLRKAKARQVTISPIGELRDPGFKG

SEQ ID NO: 181 - protein, 1062 aa, Ralstonia syzygii
MAEKQHRWGLDIGTNSIGWAVIALIEGRPAGLVATGSRIFSDGRNPKDGSSLAVERRGPRQMRRRRDRYLRRRDRFMQALINVGLMPGDAAARKALVTENPYVLRQRGLDQALTLPEFGRALFHLNQRRGFQSNRKTDRATAKESGKVKNAIAAFRAGMGNARTVGEALARRLEDGRPVRARMVGQGKDEHYELYIAREWIAQEFDALWASQQRFHAEVLADAARDRLRAILLFQRKLLPVPVGKCFLEPNQPRVAAALPSAQRFRLMQELNHLRVMTLADKRERPLSFQERNDLLAQLVARPKCGFDMLRKIVFGANKEAYRFTIESERRKELKGCDTAAKLAKVNALGTRWQALSLDEQDRLVCLLLDGENDAVLADALREHYGLTDAQIDTLLGLSFEDGHMRLGRSALLRVLDALESGRDEQGLPLSYDKAVVAAGYPAHTADLENGERDALPYYGELLWRYTQDAPTAKNDAERKFGKIANPTVHIGLNQLRKLVNALIQRYGKPAQIVVELARNLKAGLEEKERIKKQQTANLERNERIRQKLQDAGVPDNRENRLRMRLFEELGQGNGLGTPCIYSGRQISLQRLFSNDVQVDHILPFSKTLDDSFANKVLAQHDANRYKGNRGPFEAFGANRDGYAWDDIRARAAVLPRNKRNRFAETAMQDWLHNETDFLARQLTDTAYLSRVARQYLTAICSKDDVYVSPGRLTAMLRAKWGLNRVLDGVMEEQGRPAVKNRDDHRHHAIDAVVIGATDRAMLQQVATLAARAREQDAERLIGDMPTPWPNFLEDVRAAVARCVVSHKPDHGPEGGLHNDTAYGIVAGPFEDGRYRVRHRVSLFDLKPGDLSNVRCDAPLQAELEPIFEQDDARAREVALTALAERYRQRKVWLEELMSVLPIRPRGEDGKTLPDSAPYKAYKGDSNYCYELFINERGRWDGELISTFRANQAAYRRFRNDPARFRRYTAGGRPLLMRLCINDYIAVGTAAERTIFRVVKMSENKITLAEHFEGGTLKQRDADKDDPFKYLTKSPGALRDLGARRIFVDLIGRVLDPGIKGD

SEQ ID NO: 182 - protein, 1079 aa, Dinoroseobacter shibae
MRLGLDIGTSSIGWWLYETDGAGSDARITGVVDGGVRIFSDGRDPKSGASLAVDRRAARAMRRRRDRYLRRRATLMKVLAETGLMPADPAEAKALEALDPFALRAAGLDEPLPLPHLGRALFHLNQRRGFKSNRKTDRGDNESGKIKDATARLDMEMMANGARTYGEFLHKRRQKATDPRHVPSVRTRLSIANRGGPDGKEEAGYDFYPDRRHLEEEFHKLWAAQGAHHPELTETLRDLLFEKIFFQRPLKEPEVGLCLFSGHHGVPPKDPRLPKAHPLTQRRVLYETVNQLRVTADGREARPLTREERDQVIHALDNKKPTKSLSSMVLKLPALAKVLKLRDGERFTLETGVRDAIACDPLRASPAHPDRFGPRWSILDADAQWEVISRIRRVQSDAEHAALVDWLTEAHGLDRAHAEATAHAPLPDGYGRLGLTATTRILYQLTADVVTYADAVKACGWHHSDGRTGECFDRLPYYGEVLERHVIPGSYHPDDDDITRFGRITNPTVHIGLNQLRRLVNRIIETHGKPHQIVVELARDLKKSEEQKRADIKRIRDTTEAAKKRSEKLEELEIEDNGRNRMLLRLWEDLNPDDAMRRFCPYTGTRISAAMIFDGSCDVDHILPYSRTLDDSFPNRTLCLREANRQKRNQTPWQAWGDTPHWHAIAANLKNLPENKRWRFAPDAMTRFEGENGFLDRALKDTQYLARISRSYLDTLFTKGGHVWVVPGRFTEMLRRHWGLNSLLSDAGRGAVKAKNRTDHRHHAIDAAVIAATDPGLLNRISRAAGQGEAAGQSAELIARDTPPPWEGFRDDLRVRLDRIIVSHRADHGRIDHAARKQGRDSTAGQLHQETAYSIVDDIHVASRTDLLSLKPAQLLDEPGRSGQVRDPQLRKALRVATGGKTGKDFENALRYFASKPGPYQAIRRVRIIKPLQAQARVPVPAQDPIKAYQGGSNHLFEIWRLPDGEIEAQVITSFEAHTLEGEKRPHPAAKRLLRVHKGDMVALERDGRRVVGHVQKMDIANGLFIVPHNEANADTRNNDKSDPFKWIQIGARPAIASGIRRVSVDEIGRLRDGGTRPI

SEQ ID NO: 183 - protein, 1168 aa, Azospirillum sp-
MARPAFRAPRREHVNGWTPDPHRISKPFFILVSWHLLSRVVIDSSSGCFPGTSRDHTDKFAEWECAVQPYRLSFDLGTNSIGWGLLNLDRQGKPREIRALGSRIFSDGRDPQDKASLAVARRLARQMRRRRDRYLTRRTRLMGALVRFGLMPADPAARKRLEVAVDPYLARERATRERLEPFEIGRALFHLNQRRGYKPVRTATKPDEEAGKVKEAVERLEAAIAAAGAPTLGAWFAWRKTRGETLRARLAGKGKEAAYPFYPARRMLEAEFDTLWAEQARHHPDLLTAEAREILRHRIFHQRPLKPPPVGRCTLYPDDGRAPRALPSAQRLRLFQELASLRVIHLDLSERPLTPAERDRIVAFVQGRPPKAGRKPGKVQKSVPFEKLRGLLELPPGTGFSLESDKRPELLGDETGARIAPAFGPGWTALPLEEQDALVELLLTEAEPERAIAALTARWALDEATAAKLAGATLPDFHGRYGRRAVAELLPVLERETRGDPDGRVRPIRLDEAVKLLRGGKDHSDFSREGALLDALPYYGAVLERHVAFGTGNPADPEEKRVGRVANPTVHIALNQLRHLVNAILARHGRPEEIVIELARDLKRSAEDRRREDKRQADNQKRNEERKRLILSLGERPTPRNLLKLRLWEEQGPVENRRCPYSGETISMRMLLSEQVDIDHILPFSVSLDDSAANKVVCLREANRIKRNRSPWEAFGHDSERWAGILARAEALPKNKRWRFAPDALEKLEGEGGLRARHLNDTRHLSRLAVEYLRCVCPKVRVSPGRLTALLRRRWGIDAILAEADGPPPEVPAETLDPSPAEKNRADHRHHALDAVVIGCIDRSMVQRVQLAAASAEREAAAREDNIRRVLEGFKEEPWDGFRAELERRARTIVVSHRPEHGIGGALHKETAYGPVDPPEEGFNLVVRKPIDGLSKDEINSVRDPRLRRALIDRLAIRRRDANDPATALAKAAEDLAAQPASRGIRRVRVLKKESNPIRVEHGGNPSGPRSGGPFHKLLLAGEVHHVDVALRADGRRWVGHWVTLFEAHGGRGADGAAAPPRLGDGERFLMRLHKGDCLKLEHKGRVRVMQVVKLEPSSNSVVVVEPHQVKTDRSKHVKISCDQLRARGARRVTVDPLGRVRVHAPGARVGIGGDAGRTAMEPAEDIS

SEQ ID NO: 184 - protein, 1166 aa, Nitrobacter hamburgensis
MHVEIDFPHFSRGDSHLAMNKNEILRGSSVLYRLGLDLGSNSLGWFVTHLEKRGDRHEPVALGPGGVRIFPDGRDPQSGTSNAVDRRMARGARKRRDRFVERRKELIAALIKYNLLPDDARERRALEVLDPYALRKTALTDTLPAHHVGRALFHLNQRRGFQSNRKTDSKQSEDGAIKQAASRLATDKGNETLGVFFADMHLRKSYEDRQTAIRAELVRLGKDHLTGNARKKIWAKVRKRLFGDEVLPRADAPHGVRARATITGTKASYDYYPTRDMLRDEFNAIWAGQSAHHATITDEARTEIEHIIFYQRPLKPAIVGKCTLDPATRPFKEDPEGYRAPWSHPLAQRFRILSEARNLEIRDTGKGSRRLTKEQSDLVVAALLANREVKFDKLRTLLKLPAEARFNLESDRRAALDGDQTAARLSDKKGFNKAWRGFPPERQIAIVARLEETEDENELIAWLEKECALDGAAAARVANTTLPDGHCRLGLRAIKKIVPIMQDGLDEDGVAGAGYHIAAKRAGYDHAKLPTGEQLGRLPYYGQWLQDAVVGSGDARDQKEKQYGQFPNPTVHIGLGQLRRVVNDLIDKYGPPTEISIEFTRALKLSEQQKAERQREQRRNQDKNKARAEELAKFGRPANPRNLLKMRLWEELAHDPLDRKCVYTGEQISIERLLSDEVDIDHILPVAMTLDDSPANKIICMRYANRHKRKQTPSEAFGSSPTLQGHRYNWDDIAARATGLPRNKRWRFDANAREEFDKRGGFLARQLNETGWLARLAKQYLGAVTDPNQIWVVPGRLTSMLRGKWGLNGLLPSDNYAGVQDKAEEFLASTDDMEFSGVKNRADHRHHAIDGLVTALTDRSLLWKMANAYDEEHEKFVIEPPWPTMRDDLKAALEKMVVSHKPDHGIEGKLHEDSAYGFVKPLDATGLKEEEAGNLVYRKAIESLNENEVDRIRDIQLRTIVRDHVNVEKTKGVALADALRQLQAPSDDYPQFKHGLRHVRILKKEKGDYLVPIANRASGVAYKAYSAGENFCVEVFETAGGKWDGEAVRRFDANKKNAGPKIAHAPQWRDANEGAKLVMRIHKGDLIRLDHEGRARIMVVHRLDAAAGRFKLADHNETGNLDKRHATNNDIDPFRWLMASYNTLKKLAAVPVRVDELGRVWRVMPN

SEQ ID NO: 185 - protein, 1064 aa, Bradyrhizobium sp-
MKRTSLRAYRLGVDLGANSLGWFVVWLDDHGQPEGLGPGGVRIFPDGRNPQSKQSNAAGRRLARSARRRRDRYLQRRGKLMGLLVKHGLMPADEPARKRLECLDPYGLRAKALDEVLPLHHVGRALFHLNQRRGLFANRAIEQGDKDASAIKAAAGRLQTSMQACGARTLGEFLNRRHQLRATVRARSPVGGDVQARYEFYPTRAMVDAEFEAIWAAQAPHHPTMTAEAHDTIREAIFSQRAMKRPSIGKCSLDPATSQDDVDGFRCAWSHPLAQRFRIWQDVRNLAVVETGPTSSRLGKEDQDKVARALLQTDQLSFDEIRGLLGLPSDARFNLESDRRDHLKGDATGAILSARRHFGPAWHDRSLDRQIDIVALLESALDEAAIIASLGTTHSLDEAAAQRALSALLPDGYCRLGLRAIKRVLPLMEAGRTYAEAASAAGYDHALLPGGKLSPTGYLPYYGQWLQNDVVGSDDERDTNERRWGRLPNPTVHIGIGQLRRVVNELIRWHGPPAEITVELTRDLKLSPRRLAELEREQAENQRKNDKRTSLLRKLGLPASTHNLLKLRLWDEQGDVASECPYTGEAIGLERLVSDDVDIDHLIPFSISWDDSAANKVVCMRYANREKGNRTPFEAFGHRQGRPYDWADIAERAARLPRGKRWRFGPGARAQFEELGDFQARLLNETSWLARVAKQYLAAVTHPHRIHVLPGRLTALLRATWELNDLLPGSDDRAAKSRKDHRHHAIDALVAALTDQALLRRMANAHDDTRRKIEVLLPWPTFRIDLETRLKAMLVSHKPDHGLQARLHEDTAYGTVEHPETEDGANLVYRKTFVDISEKEIDRIRDRRLRDLVRAHVAGERQQGKTLKAAVLSFAQRRDIAGHPNGIRHVRLTKSIKPDYLVPIRDKAGRIYKSYNAGENAFVDILQAESGRWIARATTVFQANQANESHDAPAAQPIMRVFKGDMLRIDHAGAEKFVKIVRLSPSNNLLYLVEHHQAGVFQTRHDDPEDSFRWLFASFDKLREWNAELVRIDTLGQPWRRKRGLETGSEDATRIGWTRPKKWP

SEQ ID NO: 186 - protein, 1059 aa, Wolinella succinogenes
MIERILGVDLGISSLGWAIVEYDKDDEAANRIIDCGVRLFTAAETPKKKESPNKARREARGIRRVLNRRRVRMNMIKKLFLRAGLIQDVDLDGEGGMFYSKANRADVWELRHDGLYRLLKGDELARVLIHIAKHRGYKFIGDDEADEESGKVKKAGVVLRQNFEAAGCRTVGEWLWRERGANGKKRNKHGDYEISIHRDLLVEEVEAIFVAQQEMRSTIATDALKAAYREIAFFVRPMQRIEKMVGHCTYFPEERRAPKSAPTAEKFIAISKFFSTVIIDNEGWEQKIIERKTLEELLDFAVSREKVEFRHLRKFLDLSDNEIFKGLHYKGKPKTAKKREATLFDPNEPTELEFDKVEAEKKAWISLRGAAKLREALGNEFYGRFVALGKHADEATKILTYYKDEGQKRRELTKLPLEAEMVERLVKIGFSDFLKLSLKAIRDILPAMESGARYDEAVLMLGVPHKEKSAILPPLNKTDIDILNPTVIRAFAQFRKVANALVRKYGAFDRVHFELAREINTKGEIEDIKESQRKNEKERKEAADWIAETSFQVPLTRKNILKKRLYIQQDGRCAYTGDVIELERLFDEGYCEIDHILPRSRSADDSFANKVLCLARANQQKTDRTPYEWFGHDAARWNAFETRTSAPSNRVRTGKGKIDRLLKKNFDENSEMAFKDRNLNDTRYMARAIKTYCEQYWVFKNSHTKAPVQVRSGKLTSVLRYQWGLESKDRESHTHHAVDAIIIAFSTQGMVQKLSEYYRFKETHREKERPKLAVPLANFRDAVEEATRIENTETVKEGVEVKRLLISRPPRARVTGQAHEQTAKPYPRIKQVKNKKKWRLAPIDEEKFESFKADRVASANQKNFYETSTIPRVDVYHKKGKFHLVPIYLHEMVLNELPNLSLGTNPEAMDENFFKFSIFKDDLISIQTQGTPKKPAKIIMGYFKNMHGANMVLSSINNSPCEGFTCTPVSMDKKHKDKCKLCPEENRIAGRCLQGFLDYWSQEGLRPPRKEFECDQGVKFALDVKKYQIDPLGYYYEVKQEKRLGTIPQMRSAKKLVKK

SEQ ID NO: 187 - protein, 984 aa, Campylobacter jejuni
MARILAFDIGISSIGWAFSENDELKDCGVRIFTKVENPKTGESLALPRRLARSARKRLARRKARLNHLKHLIANEFKLNYEDYQSFDESLAKAYKGSLISPYELRFRALNELLSKQDFARVILHIAKRRGYDDIKNSDDKEKGAILKAIKQNEEKLANYQSVGEYLYKEYFQKFKENSKEFTNVRNKKESYERCIAQSFLKDELKLIFKKQREFGFSFSKKFEEEVLSVAFYKRALKDFSHLVGNCSFFTDEKRAPKNSPLAFMFVALTRIINLLNNLKNTEGILYTKDDLNALLNEVLKNGTLTYKQTKKLLGLSDDYEFKGEKGTYFIEFKKYKEFIKALGEHNLSQDDLNEIAKDITLIKDEIKLKKALAKYDLNQNQIDSLSKLEFKDHLNISFKALKLVTPLMLEGKKYDEACNELNLKVAINEDKKDFLPAFNETYYKDEVTNPVVLRAIKEYRKVLNALLKKYGKVHKINIELAREVGKNHSQRAKIEKEQNENYKAKKDAELECEKLGLKINSKNILKLRLFKEQKEFCAYSGEKIKISDLQDEKMLEIDHIYPYSRSFDDSYMNKVLVFTKQNQEKLNQTPFEAFGNDSAKWQKIEVLAKNLPTKKQKRILDKNYKDKEQKNFKDRNLNDTRYIARLVLNYTKDYLDFLPLSDDENTKLNDTQKGSKVHVEAKSGMLTSALRHTWGFSAKDRNNHLHHAIDAVIIAYANNSIVKAFSDFKKEQESNSAELYAKKISELDYKNKRKFFEPFSGFRQKVLDKIDEIFVSKPERKKPSGALHEETFRKEEEFYQSYGGKEGVLKALELGKIRKVNGKIVKNGDMFRVDIFKHKKTNKFYAVPIYTMDFALKVLPNKAVARSKKGEIKDWILMDENYEFCFSLYKDSLILIQTKDMQEPEFVYYNAFTSSTVSLIVSKHDNKFETLSKNQKILFKNANEKEVIAKSIGIQNLKVFEKYIVSALGEVTKAEFRQREDFKK

SEQ ID NO: 188 - protein, 1024 aa, Helicobacter mustelae
MIRTLGIDIGIASIGWAVIEGEYTDKGLENKEIVASGVRVFTKAENPKNKESLALPRTLARSARRRNARKKGRIQQVKHYLSKALGLDLECFVQGEKLATLFQTSKDFLSPWELRERALYRVLDKEELARVILHIAKRRGYDDITYGVEDNDSGKIKKAIAENSKRIKEEQCKTIGEMMYKLYFQKSLNVRNKKESYNRCVGRSELREELKTIFQIQQELKSPWVNEELIYKLLGNPDAQSKQEREGLIFYQRPLKGFGDKIGKCSHIKKGENSPYRACKHAPSAEEFVALTKSINFLKNLTNRHGLCFSQEDMCVYLGKILQEAQKNEKGLTYSKLKLLLDLPSDFEFLGLDYSGKNPEKAVFLSLPSTFKLNKITQDRKTQDKIANILGANKDWEAILKELESLQLSKEQIQTIKDAKLNFSKHINLSLEALYHLLPLMREGKRYDEGVEILQERGIFSKPQPKNRQLLPPLSELAKEESYFDIPNPVLRRALSEFRKVVNALLEKYGGFHYFHIELTRDVCKAKSARMQLEKINKKNKSENDAASQLLEVLGLPNTYNNRLKCKLWKQQEEYCLYSGEKITIDHLKDQRALQIDHAFPLSRSLDDSQSNKVLCLTSSNQEKSNKTPYEWLGSDEKKWDMYVGRVYSSNFSPSKKRKLTQKNFKERNEEDFLARNLVDTGYIGRVTKEYIKHSLSFLPLPDGKKEHIRIISGSMTSTMRSFWGVQEKNRDHHLHHAQDAIIIACIEPSMIQKYTTYLKDKETHRLKSHQKAQILREGDHKLSLRWPMSNFKDKIQESIQNIIPSHHVSHKVTGELHQETVRTKEFYYQAFGGEEGVKKALKFGKIREINQGIVDNGAMVRVDIFKSKDKGKFYAVPIYTYDFAIGKLPNKAIVQGKKNGIIKDWLEMDENYEFCFSLFKNDCIKIQTKEMQEAVLAIYKSTNSAKATIELEHLSKYALKNEDEEKMFTDTDKEKNKTMTRESCGIQGLKVFQKVKLSVLGEVLEHKPRNRQNIALKTTPKHV

SEQ ID NO: 189 - protein, 1069 aa, Bacillus cereus
MNYDIGLRIGITSCGWSIINKDLERIEDLGVRVFEKAENPDGTASAAPRREARKSRRKHRRKKHRIERIKRLIVQHDLLSKKELDSLYLSPFNIDVWNLQVEALERKLDNREFARVLIHLVQRRGFQTIRKSVEIQEEGKLLENVSENERIMKVNGYKTVGEMFSKHEKFTHHKRNKDGSYTSVVTRSLLLKEIKTIFNSQRILGNVFSTQKLESDYLYIWGSQRPTLTYEQLMSMVGNCIYEKKEKRAPKTSWAFQYFSLLQKINKLKVSDDNTLRKLSKEERDIVIELAFKKKNVSFVDIRKALKLNDNTKFNHLTYSHVVETKKVEKATFIELKGYHLIKKQLKDRNVELTQELQPKDYDAIAAASTFFKNDIEFRDYLRNQYLDSNGKRKSNIANKVFEDKVIAAVFELNFSKVCHLSFKSLYKLIPHLEKGLDYKEAILCAGYNFRDENKRDKKLFLPVIQQETNPVVHRALTQARKVINAIIREYGSPNTIRFVVANDLAKTYKQRKELESTLKKNRAENEKIKTKLLSMGIINPTGMDIVKYKLWYEQSGICLYTGRQMELSSLFKPGYSIVNHIIPYNRSFDDTYHNRVLTLTETKYEKGNKIPFEYFGAEETCWNEYEKRVSTSKKIHDKKREKLLIRNFDIEYENEMISNNVFDTHYIGSYFEKYIDEHLQFKKSTKKQKVFSIHGNMVAHLHSRWGFNKNSREIYLNHAVDAAIVAVLTDQLIRNIADYYRRDNILEQKGSLKFPEPWKSFSIELEARISPQVRDLIKKLNLDSYLDVDILHIKPVFISKKPRRKVNGEAHKSTIRSLIGINEIGKTVTCIKTRLEDIPFDENGDFPMYGKDTDKYTYTAIKERYLEFNKDKEKAFSTPLYKLKRNGEPGNQIKSVKIIDTRNIVNKVNQGKGIAYNSNIIRVDVFSRDQKYYVVPIYLRDFIKGSLPNKIITAAKGFMQWPETDNSYTFLFSIFPNDLIKVVPKEGKFIKAKNENKENINLTEILGYFKGLDSSTGAFTLESHDGSLLARGIGTKNLLLIEKYQVDVLGRYNKVGNEERQDIKIQQN

SEQ ID NO: 190 - protein, 1131 aa, Acidovorax ebreus
MAQHVFGLDIGIASVGWAILGEQRIIDLGVRCFDKAETAKEGDPLNLTRRQARLLRRRLYRRAWRLTQLSRLLKRKGLIADAKLFAKAPSYGDSAWELRRQGLDRLLTPLEWARVIYHQCKHRGFHWTSKAEEAKADSDAEGGRVKQGLAHTKALMQAKNYRSAAEMVLAEFPDAQRNKRGQYDKALSRVLLGEELALLFATQRRLGNPHASDFFEKLILGDGDRKSGLFWQQKPALSGADLLKMLGKCTFEKGEYRAPKASFSVERHVWLTRLNNLRIVVDGRSRPLNEAERQAALLLPYQTETSKYKTLKNAFIKAGLWGDGVRFGGLAYPSQAQIDAEKTKDPEDQFLVKLPAWHELRKAFKAAGHEALWQQISTPALDGDPTLLDQIATVLSVYKDGAEVVQQLRQLALPEPAASIAVLEKISFDKFSSLSLKALRRIVPLMQSGLRYDEAVAQIPEYGHHSQRIEPGAAKHLYLPPFYEAQRKYAGKGDHIGSMQFRDDADIPRNPVVLRALNQARKVVNALIREYGSPIAVNIEMARDLSRPLDERNKVKRAQEEFRDRNDRARSEFERDFGYKPKAAAFEKWMLYREQLGQCAYSQQPLDIQRVLDDHNYAQVDHALPYSRSYDDSKNNKVLVLTHENQNKGNRTAFEYLTSFPDGEDGERWRTFVAWVQGNKAYRMAKRNRLLRKNYGVDESKGFIDRNLNDTRYICKFFKNYVEEHLQLAARADGDTARRCVVVNGQLTAFLRARWGLTKVRGDSDRHHALDAAVVAACTHGMVKALADYSRRKEISFLQEGFPDPETGEILNPAAFDRARQHFPEPWTHFAHELKARLFTDDLAALREDMQRLGSYTTEDLGRLRTLFVSRAPQRRSGGAVHKETIYAQPESLKQQGGVIEKILLTSLKLQDFDKLLNPESNDHFVEPHRNERLYAAIRQRLEQFGGRADKAFGPDNLFHKPDKNNQPTGPVVRSIKLVRGKQTGIPIRGGLAKNDSMLRVDIFTKAGKFHLVPVYVHHRVTGLPNRAIVAFKDEDEWTLIDESFAFLFSVYPNDYVKVTLKKEQQSGYYSGADRSTGAMNLWAHDRAASVGKDGLIRGIGVKTALSVEKFNVDVLGRIYLAPPETRSGLA

SEQ ID NO: 191 - protein, 1032 aa, Unknown
  Description of Unknown: uncultured Termite group 1 bacterium phylotype RsD17 polypeptide
MKKRILGLDIGIASVGWALVEFDDEFQDNKKKGTIIKSGVRIFTRAETPKERESLAKPRREARSQRRRIRRRVERLNSIRELFVKNGVVEEWSVSKKNPNNIYITLNQIKTPWQLRMESLDRKLTNEQFAVVLTHLAKHRGYKSLRKDDKAGKVLEAISQNKKRLNDSDYRTLGEMFCKNESYKEHKRNKGGEYINSVARELIEEEVEKIFVKQREKGNNFADVNTEREYLKIAFSQKPAGSISKMVGFCTFENGEKRAPRDSYSAELFKVLCTINNTTFTDMKTGEIRSFSKEEIGKTLETVKNVKDVKYAKIRKDLGLEDSVKFSGVDYRENAKSKGEGEIFVSMKTYHEIKSKIEKLSKEKWDNLKGNTELLDSIVNIIANLKDDESIKKEFQKLKIDEDIIDVLLNFEFKKFINLSFKALRKIIPFQFQGQKYITASTSAGYSLKQEGIKNKLVPPAKENINVAVVARAFAQTRKVINAVIRKYGQFDQINIELATELKNSKFDRSKIEEGQKKFQSQKDKIFKEVQELRGGMTPSSSLLLKYRLWREQDERCVYSGRKISFEDLLDTGFLDIDHIIPYSKSMDDSFNNKVLCLAEENRNKKNDIPFNYYQRIDRDWNLLISIITSMKNMKIAKKSRLLKQELSDIEGFIERNINDTRYATRYIKDFLENNLEFKENEFIKVKVQARSGGLTSVLSYNWGMSKDREESYFHHAKDAIIVACSTQGMVQYISKISQQYENDKDKMKKIKDKTENCIPKPWDSFRADVEESIEGIFVSFAPRHKVTGSAHKETIYSKKHLEKERYVTVKKSLDKIKLSDLENIPCNENCGIIRVLKERLEKFKNDSLKAFADPVHMPTKCPNKKGPVIRSVKIKESNKTGIEVRKGLAERGEMVRVDVFIKDKKYYLVPIYVSDFKNKDLPNKAIAALKLENEWIMIDKTYSFKFSLFKDDLIKIKKKKEEIFGYFGGVHRSTGTIKIKSRHKPKEIDEGIGSRCLLDFRKFQVDVLGNYTEVKHEKRMPAYITRKDKKH

SEQ ID NO: 192 - protein, 1065 aa, Clostridium perfringens
MNKDINYALGLDIGITSVGWAVINLDLNRIEDLGVRIFNAAENLKDGSSLALPRRLARGRRRLLRRKAYRVERVRKLILKNNILTKEELEGLFKNKEVIDVWEARVKGLDYKLSREEWAKILINFCKRRGFKSNRKNEAKDKEAGQILSSISYNIEKMKETNSRTIGEYIYNEVKNSEDSYAPLRNKFGEYKMCVSRDVIREEIHTLFEKQRELGNNFASDEIEDKYFEIFNSQRPFSNFEDLEKLVGFCTFERKKHKRAPKHCISSEEFTLYEGINKLSIIKDGEKRKLSEEERTLVVNEAFNKKEIKYTTLRKLLGLSEEELFSTLTYSIDKDISKTENTKFVSLKGYHEIKRAIEKGVSKKAWQDIENNRNLLNDIAYVLTLGKTDDEIEKQLRLRNVPEELFESLLDMSFNKFNNLSIYALEKILPFMKEGYQYNEACEKAGYNFKAIYEGVRTKKLPVIEIDEIVNPVVNRALAQTRKVINSVIDKYGSPVRINIELARDLAKNFKDRKLIEKEQKENRANLDKIRENLRELMDKEPTVVEVLKYRLWEQQRGECAYTQSQIPLERLFSPGYCEIDHIIPFSRSFDDSLSNKILVLGSENQRKGNRTPYEYFGEDSERWNSFEIWVKGSYLNYKKKANLLKKKFSEEEQRDWKARNLQDTKYICRYISNFVNNRLEFKESENKQKVITVNGRATAYLRSRWGLNKVREDGDKHHALDAAVVGVTTQGMVQKISKYSKAHELYTVRKNDEFVDVETGECVDVDEYKEIRKDILPRPWRGFSEELKLRLSDNPLEELKKSPIETYNEEFIKENVKPIFVSRVPFRKISGKLFKETIYSERAFKDGYFVSKKSLVDLKRGDLDNFYNYECDKKLYDAISERMKEFNYNGKKAFESPFRKPTKSGKEGPVVRSVKIKSAVPFKDGIPMNEGLVAKEGMVRIDIYEKEGKYFVVPVYRYQLAKGIVPKRAAIAKKDELKWPIMDQTYNFKFSIYKNDLIEVKYDKKGVYFGYYDGFDRNSASLTIEKHDNSERYRSIGLKVGVLEINKYEVDVLGNYHKVKLGGN

SEQ ID NO: 193 - protein, 1021 aa, Clostridium cellulolyticum
MKYTLGLDVGIASVGWAVIDKDNNKIIDLGVRCFDKAEESKTGESLATARRIARGMRRRISRRSQRLRLVKKLFVQYEIIKDSSEFNRIFDTSRDGWKDPWELRYNALSRILKPYELVQVLTHITKRRGFKSNRKEDLSTTKEGVVITSIKNNSEMLRTKNYRTIGEMIFMETPENSNKRNKVDEYIHTIAREDLLNEIKYIFSIQRKLGSPFVTEKLEHDFLNIWEFQRPFASGDSILSKVGKCTLLKEELRAPTSCYTSEYFGLLQSINNLVLVEDNNTLTLNNDQRAKIIEYAHFKNEIKYSEIRKLLDIEPEILFKAHNLTHKNPSGNNESKKFYEMKSYHKLKSTLPTDIWGKLHSNKESLDNLFYCLTVYKNDNEIKDYLQANNLDYLIEYIAKLPTFNKFKHLSLVAMKRIIPFMEKGYKYSDACNMAELDFTGSSKLEKCNKLTVEPIIENVTNPVVIRALTQARKVINAIIQKYGLPYMVNIELAREAGMTRQDRDNLKKEHENNRKAREKISDLIRQNGRVASGLDILKWRLWEDQGGRCAYSGKPIPVCDLLNDSLTQIDHIYPYSRSMDDSYMNKVLVLTDENQNKRSYTPYEVWGSTEKWEDFEARIYSMHLPQSKEKRLLNRNFITKDLDSFISRNLNDTRYISRFLKNYIESYLQFSNDSPKSCVVCVNGQCTAQLRSRWGLNKNREESDLHHALDAAVIACADRKIIKEITNYYNERENHNYKVKYPLPWHSFRQDLMETLAGVFISRAPRRKITGPAHDETIRSPKHFNKGLTSVKIPLTTVTLEKLETMVKNTKGGISDKAVYNVLKNRLIEHNNKPLKAFAEKIYKPLKNGTNGAIIRSIRVETPSYTGVFRNEGKGISDNSLMVRVDVFKKKDKYYLVPIYVAHMIKKELPSKAIVPLKPESQWELIDSTHEFLFSLYQNDYLVIKTKKGITEGYYRSCHRGTGSLSLMPHFANNKNVKIDIGVRTAISIEKYNVDILGNKSIVKGEPRRGMEKYNSFKSN

SEQ ID NO: 194 - protein, 1037 aa, Parvibaculum lavamentivorans
MERIFGFDIGTTSIGFSVIDYSSTQSAGNIQRLGVRIFPEARDPDGTPLNQQRRQKRMMRRQLRRRRIRRKALNETLHEAGFLPAYGSADWPVVMADEPYELRRRGLEEGLSAYEFGRAIYHLAQHRHFKGRELEESDTPDPDVDDEKEAANERAATLKALKNEQTTLGAWLARRPPSDRKRGIHAHRNVVAEEFERLWEVQSKFHPALKSEEMRARISDTIFAQRPVFWRKNTLGECRFMPGEPLCPKGSWLSQQRRMLEKLNNLAIAGGNARPLDAEERDAILSKLQQQASMSWPGVRSALKALYKQRGEPGAEKSLKFNLELGGESKLLGNALEAKLADMFGPDWPAHPRKQEIRHAVHERLWAADYGETPDKKRVIILSEKDRKAHREAAANSFVADFGITGEQAAQLQALKLPTGWEPYSIPALNLFLAELEKGERFGALVNGPDWEGWRRTNFPHRNQPTGEILDKLPSPASKEERERISQLRNPTVVRTQNELRKVVNNLIGLYGKPDRIRIEVGRDVGKSKREREEIQSGIRRNEKQRKKATEDLIKNGIANPSRDDVEKWILWKEGQERCPYTGDQIGFNALFREGRYEVEHIWPRSRSFDNSPRNKTLCRKDVNIEKGNRMPFEAFGHDEDRWSAIQIRLQGMVSAKGGTGMSPGKVKRFLAKTMPEDFAARQLNDTRYAAKQILAQLKRLWPDMGPEAPVKVEAVTGQVTAQLRKLWTLNNILADDGEKTRADHRHHAIDALTVACTHPGMTNKLSRYWQLRDDPRAEKPALTPPWDTIRADAEKAVSEIVVSHRVRKKVSGPLHKETTYGDTGTDIKTKSGTYRQFVTRKKIESLSKGELDEIRDPRIKEIVAAHVAGRGGDPKKAFPPYPCVSPGGPEIRKVRLTSKQQLNLMAQTGNGYADLGSNHHIAIYRLPDGKADFEIVSLFDASRRLAQRNPIVQRTRADGASFVMSLAAGEAIMIPEGSKKGIWIVQGVWASGQVVLERDTDADHSTTTRPMPNPILKDDAKKVSIDPIGRVRPSND

SEQ ID NO: 195 - protein, 1140 aa, Roseburia intestinalis
MRENGSDERRRNMDEKMDYRIGLDIGIASVGWAVLQNNSDDEPVRIVDLGVRIFDTAEIPKTGESLAGPRRAARTTRRRLRRRKHRLDRIKWLFENQGLINIDDFLKRYNMAGLPDVYQLRYEALDRKLTDEELAQVLLHIAKHRGFRSTRKAETAAKENGAVLKATDENQKRMQEKGYRTVGEMIYLDEAFRTGCSWSEKGYILTPRNKAENYQHTMLRAMLVEEVKEIFSSQRRLGNEKATEELEEKYLEIMTSQRSFDLGPGMQPDGKPSPYAMEGFSDRVGKCTFLGDQGELRGAKGTYTAEYFVALQKINHTKLVNQDGETRNFTEEERRALTLLLFTQKEVKYAAVRKKLGLPEDILFYNLNYKKAATKEEQQKENQNTEKAKFIGMPYYHDYKKCLEERVKYLTENEVRDLFDEIGMILTCYKNDDSRTERLAKLGLVPIEMEGLLAYTPTKFQHLSMKAMRNIIPFLEKGMTYDKACEEAGYDFKADSKGTKQKLLTGENVNQTINEITNPVVKRSVSQTVKVINAIIRTYGSPQAINIELAREMSKTFEERRKIKGDMEKRQKNNEDVKKQIQELGKLSPTGQDILKYRLWQEQQGICMYSGKTIPLEELFKPGYDIDHILPYSITFDDSFRNKVLVTSQENRQKGNRTPYEYMGNDEQRWNEFETRVKTTIRDYKKQQKLLKKHFSEEERSEFKERNLTDTKYITTVIYNMIRQNLEMAPLNRPEKKKQVRAVNGAITAYLRKRWGLPQKNRETDTHHAMDAVVIACCTDGMIQKISRYTKVRERCYSKGTEFVDAETGEIFRPEDYSRAEWDEIFGVHIPKPWETFRAELDVRMGDDPKGFLDTHSDVALELDYPEYIYENLRPIFVSRMPNHKVTGAAHADTIRSPRHFKDEGIVLTKTALTDLKLDKDGEIDGYYNPQSDLLLYEALKKQLLLYGNDAKKAFAQDFHKPKADGTEGPVVRKVKIQKKQTMGVFVDSGNGIAENGGMVRIDVFRVNGKYYFVPVYTADVVKKVLPNRASTAHKPYGEWKVMEDKDFLFSLYSRDLIHIKSKKDIPIKMVNGGMEGIKETYAYYIGADISAANIQGIAHDSRYKFRGLGIQSLDVLEKCQIDVLGHVSVVRSEKRMGFS

SEQ ID NO: 196 - protein, 1082 aa, Neisseria meningitidis
MAAFKPNPINYILGLDIGIASVGWAMVEIDEDENPICLIDLGVRVFERAEVPKTGDSLAMARRLARSVRRLTRRRAHRLLRARRLLKREGVLQAADFDENGLIKSLPNTPWQLRAAALDRKLTPLEWSAVLLHLIKHRGYLSQRKNEGETADKELGALLKGVADNAHALQTGDFRTPAELALNKFEKESGHIRNQRGDYSHTFSRKDLQAELILLFEKQKEFGNPHVSGGLKEGIETLLMTQRPALSGDAVQKMLGHCTFEPAEPKAAKNTYTAERFIWLTKLNNLRILEQGSERPLTDTERATLMDEPYRKSKLTYAQARKLLGLEDTAFFKGLRYGKDNAEASTLMEMKAYHAISRALEKEGLKDKKSPLNLSPELQDEIGTAFSLFKTDEDITGRLKDRIQPEILEALLKHISFDKFVQISLKALRRIVPLMEQGKRYDEACAEIYGDHYGKKNTEEKIYLPPIPADEIRNPVVLRALSQARKVINGVVRRYGSPARIHIETAREVGKSFKDRKEIEKRQEENRKDREKAAAKFREYFPNFVGEPKSKDILKLRLYEQQHGKCLYSGKEINLGRLNEKGYVEIDHALPFSRTWDDSFNNKVLVLGSENQNKGNQTPYEYFNGKDNSREWQEFKARVETSRFPRSKKQRILLQKFDEDGFKERNLNDTRYVNRFLCQFVADRMRLTGKGKKRVFASNGQITNLLRGFWGLRKVRAENDRHHALDAVVVACSTVAMQQKITRFVRYKEMNAFDGKTIDKETGEVLHQKTHFPQPWEFFAQEVMIRVFGKPDGKPEFEEADTPEKLRTLLAEKLSSRPEAVHEYVTPLFVSRAPNRKMSGQGHMETVKSAKRLDEGVSVLRVPLTQLKLKDLEKMVNREREPKLYEALKARLEAHKDDPAKAFAEPFYKYDKAGNRTQQVKAVRVEQVQKTGVWVRNHNGIADNATMVRVDVFEKGDKYYLVPIYSWQVAKGILPDRAVVQGKDEEDWQLIDDSFNFKFSLHPNDLVEVITKKARMFGYFASCHRGTGNINIRIHDLDHKIGKNGILEGIGVKTALSFQKYQIDELGKEIRPCRLKKRPPVR

SEQ ID NO: 197 - protein, 1056 aa, Pasteurella multocida
MQTTNLSYILGLDLGIASVGWAVVEINENEDPIGLIDVGVRIFERAEVPKTGESLALSRRLARSTRRLIRRRAHRLLLAKRFLKREGILSTIDLEKGLPNQAWELRVAGLERRLSAIEWGAVLLHLIKHRGYLSKRKNESQTNNKELGALLSGVAQNHQLLQSDDYRTPAELALKKFAKEEGHIRNQRGAYTHTFNRLDLLAELNLLFAQQHQFGNPHCKEHIQQYMTELLMWQKPALSGEAILKMLGKCTHEKNEFKAAKHTYSAERFVWLTKLNNLRILEDGAERALNEEERQLLINHPYEKSKLTYAQVRKLLGLSEQAIFKHLRYSKENAESATFMELKAWHAIRKALENQGLKDTWQDLAKKPDLLDEIGTAFSLYKTDEDIQQYLTNKVPNSVINALLVSLNFDKFIELSLKSLRKILPLMEQGKRYDQACREIYGHHYGEANQKTSQLLPAIPAQEIRNPVVLRTLSQARKVINAIIRQYGSPARVHIETGRELGKSFKERREIQKQQEDNRTKRESAVQKFKELFSDFSSEPKSKDILKFRLYEQQHGKCLYSGKEINIHRLNEKGYVEIDHALPFSRTWDDSFNNKVLVLASENQNKGNQTPYEWLQGKINSERWKNFVALVLGSQCSAAKKQRLLTQVIDDNKFIDRNLNDTRYIARFLSNYIQENLLLVGKNKKNVFTPNGQITALLRSRWGLIKARENNNRHHALDAIVVACATPSMQQKITRFIRFKEVHPYKIENRYEMVDQESGEIISPHFPEPWAYFRQEVNIRVFDNHPDTVLKEMLPDRPQANHQFVQPLFVSRAPTRKMSGQGHMETIKSAKRLAEGISVLRIPLTQLKPNLLENMVNKEREPALYAGLKARLAEFNQDPAKAFATPFYKQGGQQVKAIRVEQVQKSGVLVRENNGVADNASIVRTDVFIKNNKFFLVPIYTWQVAKGILPNKAIVAHKNEDEWEEMDEGAKFKFSLFPNDLVELKTKKEYFFGYYIGLDRATGNISLKEHDGEISKGKDGVYRVGVKLALSFEKYQVDELGKNRQICRPQQRQPVR

SEQ ID NO: 198 - protein, 1422 aa, Sutterella wadsworthensis
MTQSERRFSCSIGIDMGAKYTGVFYALFDREELPTNLNSKAMTLVMPETGPRYVQAQRTAVRHRLRGQKRYTLARKLAFLVVDDMIKKQEKRLTDEEWKRGREALSGLLKRRGYSRPNADGEDLTPLENVRADVFAAHPAFSTYFSEVRSLAEQWEEFTANISNVEKFLGDPNIPADKEFIEFAVAEGLIDKTEKKAYQSALSTLRANANVLTGLRQMGHKPRSEYFKAIEADLKKDSRLAKINEAFGGAERLARLLGNLSNLQLRAERWYFNAPDIMKDRGWEPDRFKKTLVRAFKFFHPAKDQNKQHLELIKQIENSEDIIETLCTLDPNRTIPPYEDQNNRRPPLDQTLLLSPEKLTRQYGEIWKTWSARLTSAEPTLAPAAEILERSTDRKSRVAVNGHEPLPTLAYQLSYALQRAFDRSKALDPYALRALAAGSKSNKLTSARTALENCIGGQNVKTFLDCARRYYREADDAKVGLWFDNADGLLERSDLHPPMKKKILPLLVANILQTDETTGQKFLDEIWRKQIKGRETVASRCARIETVRKSFGGGFNIAYNTAQYREVNKLPRNAQDKELLTIRDRVAETADFIAANLGLSDEQKRKFANPFSLAQFYTLIETEVSGFSATTLAVHLENAWRMTIKDAVINGETVRAAQCSRLPAETARPFDGLVRRLVDRQAWEIAKRVSTDIQSKVDFSNGIVDVSIFVEENKFEFSASVADLKKNKRVKDKMLSEAEKLETRWLIKNERIKKASRGTCPYTGDRLAEGGEIDHILPRSLIKDARGIVFNAEPNLIYASSRGNQLKKNQRYSLSDLKANYRNEIFKTSNIAAITAEIEDVVTKLQQTHRLKFFDLLNEHEQDCVRHALFLDDGSEARDAVLELLATQRRTRVNGTQIWMIKNLANKIREELQNWCKTTNNRLHFQAAATNVSDAKNLRLKLAQNQPDFEKPDIQPIASHSIDALCSFAVGSADAERDQNGFDYLDGKTVLGLYPQSCEVIHLQAKPQEEKSHFDSVAIFKEGIYAEQFLPIFTLNEKIWIGYETLNAKGERCGAIEVSGKQPKELLEMLAPFFNKPVGDLSAHATYRILKKPAYEFLAKAALQPLSAEEKRLAALLDALRYCTSRKSLMSLFMAANGKSLKKREDVLKPKLFQLKVELKGEKSFKLNGSLTLPVKQDWLRICDSPELADAFGKPCSADELTSKLARIWKRPVMRDLAHAPVRREFSLPAIDNPSGGFRIRRTNLFGNELYQVHAINAKKYRGFASAGSNVDWSKGILFNELQHENLTECGGRFITSADVTPMSEWRKVVAEDNLSIWIAPGTEGRRYVRVETTFIQASHWFEQSVENWAITSPLSLPASFKVDKPAEFQKAVGTELSELLGQPRSEIFIENVGNAKHIRFWYIVVSSNKKMNESYNNVSKS

SEQ ID NO: 199 - protein, 1397 aa, gamma proteobacterium
MTKNYISPIAIDLGAKFTGVALYQYLEGADCTQEVAKGLLVDDRGNVTWSQEGRRGKRHQVRGYKRRKMAKRLLWLILDSEYGIKREEVTEPLLKFINGLLNRRGYTYISEEVDEESMNVSPLPFSEMMPDYFNSSAPLLEQLAKLLSDKNKLVRFRAEGKIPSNKNEFKKLLDTALDGKYKDEKKELSEAWGNILIASENVLKSTVDGHKSRSEYLANIKEDIKSNEELEKQISSKEIDGFYNLVGHLSNFQLRLLRKYFNDPNMSGVSYWDEKRLEKYFYQWVQGWHTKGGTDEAEKKNIILKTKGAPLLKTLKSLSADLTIPPYEDQNNRRPPKCQSVLLSDEKLTMHYPKWKEWVGQLVKQNDNAYLNENVTLANALHRIVERSRSIDPYQLRLLISITDAEKRNDLAGYKRLKLSLGSEVDEFLLLVKNIVDETKEAREGLWFETENKLFFKCGKTPPRKEKLKSTLLSAVLGKNLSDDEQSSFIEEFWKSGTPKIERRNVRGWCRLASQVQKTYGVYLKEYGLQQLHKLEAGKKLDDKPLALLYKNSGLIASKIGEALNIEPDEVSRFASPHSLAQIFNIIEGDVAGFNKTCRACTYENIWRMQEEKVESLLTNQLLSEIHGERKVPLKSAMCTRLSADSTRPFDGQMASIIEHIARKIAQHKIAQINDVPKEFSIDIPIIIESNQFSFTAELEEIKRGRGSAKAKKAKELGEKSKAGWVSKTERIKTSSEGICPYTGAPLGGSGEIDHIIPRSLTGRTKKTVFNSEANLIYCSSKGNHDKGNRVYVIEQLNDKYLKKQFSTSDVNLIKKKIKTTIQRFTEGGEKLRSFSELSREDQKAFRHALFVPELKSEVTSLLAVKNITRVNGTQAWLAKKIASLLAEHLDKQGRDYTLSAHQIDPWSVSKQRKMLASAEPIWAKKDPQPAASHVVDAVCTFLEALEQPHTASRLKTISSTSFEKTGWRSALIPDLIKVDALDRRPKYRRYNIGSTSLFKDGIYAERFLPILIDENGLMAGYDIDNSLKAKGADVVFESLSPFLLFKGEEVGAQSLSDWQERIDGRYLYMSIDKVKAFDYLQEKVGEKDIAAELLNSIHFTQRKTELRAKFSDDSGKKMKTLDAIRKSLKLTVTVNEIGKRKEKCGFSGTIGIPAKSAWENLLDEPLLETYWGTKMPPQEIWEKVYRKHFPRNIPNQAHRKVRKDFSLPVVDSVSGGFRVKRKTPNGYNYQLLAIDGYSAVGFKKEGDNVDFKSPALVPQIAESKSVTPISSELVHLDKNEIVYFDEWRKIDISDSDLKQFVSSLELAPGSQNRFYIRFTVDEDQFERHFKSALRVNGIQDLDTVNKTFDWNREIPSLLIPPRSNLFLLETGQKITFEYIANGANAEVKKAYSLRRA

SEQ ID NO: 200 - protein, 1372 aa, Legionella pneumophila
MESSQILSPIGIDLGGKFTGVCLSHLEAFAELPNHANTKYSVILIDHNNFQLSQAQRRATRHRVRNKKRNQFVKRVALQLFQHILSRDLNAKEETALCHYLNNRGYTYVDTDLDEYIKDETTINLLKELLPSESEHNFIDWFLQKMQSSEFRKILVSKVEEKKDDKELKNAVKNIKNFITGFEKNSVEGHRHRKVYFENIKSDITKDNQLDSIKKKIPSVCLSNLLGHLSNLQWKNLHRYLAKNPKQFDEQTFGNEFLRMLKNFRHLKGSQESLAVRNLIQQLEQSQDYISILEKTPPEITIPPYEARTNTGMEKDQSLLLNPEKLNNLYPNWRNLIPGIIDAHPFLEKDLEHTKLRDRKRIISPSKQDEKRDSYILQRYLDLNKKIDKFKIKKQLSFLGQGKQLPANLIETQKEMETHFNSSLVSVLIQIASAYNKEREDAAQGIWFDNAFSLCELSNINPPRKQKILPLLVGAILSEDFINNKDKWAKFKIFWNTHKIGRTSLKSKCKEIEEARKNSGNAFKIDYEEALNHPEHSNNKALIKIIQTIPDIIQAIQSHLGHNDSQALIYHNPFSLSQLYTILETKRDGFHKNCVAVTCENYWRSQKTEIDPEISYASRLPADSVRPFDGVLARMMQRLAYEIAMAKWEQIKHIPDNSSLLIPIYLEQNRFEFEESFKKIKGSSSDKTLEQAIEKQNIQWEEKFQRIINASMNICPYKGASIGGQGEIDHIYPRSLSKKHFGVIFNSEVNLIYCSSQGNREKKEEHYLLEHLSPLYLKHQFGTDNVSDIKNFISQNVANIKKYISFHLLTPEQQKAARHALFLDYDDEAFKTITKFLMSQQKARVNGTQKFLGKQIMEFLSTLADSKQLQLEFSIKQITAEEVHDHRELLSKQEPKLVKSRQQSFPSHAIDATLTMSIGLKEFPQFSQELDNSWFINHLMPDEVHLNPVRSKEKYNKPNISSTPLFKDSLYAERFIPVWVKGETFAIGFSEKDLFEIKPSNKEKLFTLLKTYSTKNPGESLQELQAKSKAKWLYFPINKTLALEFLHHYFHKEIVTPDDTTVCHFINSLRYYTKKESITVKILKEPMPVLSVKFESSKKNVLGSFKHTIALPATKDWERLFNHPNFLALKANPAPNPKEFNEFIRKYFLSDNNPNSDIPNNGHNIKPQKHKAVRKVFSLPVIPGNAGTMMRIRRKDNKGQPLYQLQTIDDTPSMGIQINEDRLVKQEVLMDAYKTRNLSTIDGINNSEGQAYATFDNWLTLPVSTFKPEIIKLEMKPHSKTRRYIRITQSLADFIKTIDEALMIKPSDSIDDPLNMPNEIVCKNKLFGNELKPRDGKMKIVSTGKIVTYEFESDSTPQWIQTLYVTQLKKQP

SEQ ID NO: 201 - protein, 1428 aa, Parasutterella excrementihominis
MGKTHIIGVGLDLGGTYTGTFITSHPSDEAEHRDHSSAFTVVNSEKLSFSSKSRTAVRHRVRSYKGFDLRRRLLLLVAEYQLLQKKQTLAPEERENLRIALSGYLKRRGYARTEAETDTSVLESLDPSVFSSAPSFTNFFNDSEPLNIQWEAIANSPETTKALNKELSGQKEADFKKYIKTSFPEYSAKEILANYVEGRRAILDASKYIANLQSLGHKHRSKYLSDILQDMKRDSRITRLSEAFGSTDNLWRIIGNISNLQERAVRWYFNDAKFEQGQEQLDAVKLKNVLVRALKYLRSDDKEWSASQKQIIQSLEQSGDVLDVLAGLDPDRTIPPYEDQNNRRPPEDQTLYLNPKALSSEYGEKWKSWANKFAGAYPLLTEDLTEILKNTDRKSRIKIRSDVLPDSDYRLAYILQRAFDRSIALDECSIRRTAEDFENGVVIKNEKLEDVLSGHQLEEFLEFANRYYQETAKAKNGLWFPENALLERADLHPPMKNKILNVIVGQALGVSPAEGTDFIEEIWNSKVKGRSTVRSICNAIENERKTYGPYFSEDYKFVKTALKEGKTEKELSKKFAAVIKVLKMVSEVVPFIGKELRLSDEAQSKFDNLYSLAQLYNLIETERNGFSKVSLAAHLENAWRMTMTDGSAQCCRLPADCVRPFDGFIRKAIDRNSWEVAKRIAEEVKKSVDFTNGTVKIPVAIEANSFNFTASLTDLKYIQLKEQKLKKKLEDIQRNEENQEKRWLSKEERIRADSHGICAYTGRPLDDVGEIDHIIPRSLTLKKSESIYNSEVNLIFVSAQGNQEKKNNIYLLSNLAKNYLAAVFGTSDLSQITNEIESTVLQLKAAGRLGYFDLLSEKERACARHALFLNSDSEARRAVIDVLGSRRKASVNGTQAWFVRSIFSKVRQALAAWTQETGNELIFDAISVPAADSSEMRKRFAEYRPEFRKPKVQPVASHSIDAMCIYLAACSDPFKTKRMGSQLAIYEPINFDNLFTGSCQVIQNTPRNFSDKTNIANSPIFKETIYAERFLDIIVSRGEIFIGYPSNMPFEEKPNRISIGGKDPFSILSVLGAYLDKAPSSEKEKLTIYRVVKNKAFELFSKVAGSKFTAEEDKAAKILEALHFVTVKQDVAATVSDLIKSKKELSKDSIENLAKQKGCLKKVEYSSKEFKFKGSLIIPAAVEWGKVLWNVFKENTAEELKDENALRKALEAAWPSSFGTRNLHSKAKRVFSLPVVATQSGAVRIRRKTAFGDFVYQSQDTNNLYSSFPVKNGKLDWSSPIIHPALQNRNLTAYGYRFVDHDRSISMSEFREVYNKDDLMRIELAQGTSSRRYLRVEMPGEKFLAWFGENSISLGSSFKFSVSEVFDNKIYTENAEFTKFLPKPREDNKHNGTIFFELVGPRVIFNYIVGGAASSLKEIFSEAGKERS

SEQ ID NO: 202 - protein, 1409 aa, Wolinella succinogenes
MLVSPISVDLGGKNTGFFSFTDSLDNSQSGTVIYDESFVLSQVGRRSKRHSKRNNLRNKLVKRLFLLILQEHHGLSIDVLPDEIRGLFNKRGYTYAGFELDEKKKDALESDTLKEFLSEKLQSIDRDSDVEDFLNQIASNAESFKDYKKGFEAVFASATHSPNKKLELKDELKSEYGENAKELLAGLRVTKEILDEFDKQENQGNLPRAKYFEELGEYIATNEKVKSFFDSNSLKLTDMTKLIGNISNYQLKELRRYFNDKEMEKGDIWIPNKLHKITERFVRSWHPKNDADRQRRAELMKDLKSKEIMELLTTTEPVMTIPPYDDMNNRGAVKCQTLRLNEEYLDKHLPNWRDIAKRLNHGKFNDDLADSTVKGYSEDSTLLHRLLDTSKEIDIYELRGKKPNELLVKTLGQSDANRLYGFAQNYYELIRQKVRAGIWVPVKNKDDSLNLEDNSNMLKRCNHNPPHKKNQIHNLVAGILGVKLDEAKFAEFEKELWSAKVGNKKLSAYCKNIEELRKTHGNTFKIDIEELRKKDPAELSKEEKAKLRLTDDVILNEWSQKIANFFDIDDKHRQRFNNLFSMAQLHTVIDTPRSGFSSTCKRCTAENRFRSETAFYNDETGEFHKKATATCQRLPADTQRPFSGKIERYIDKLGYELAKIKAKELEGMEAKEIKVPIILEQNAFEYEESLRKSKTGSNDRVINSKKDRDGKKLAKAKENAEDRLKDKDKRIKAFSSGICPYCGDTIGDDGEIDHILPRSHTLKIYGTVFNPEGNLIYVHQKCNQAKADSIYKLSDIKAGVSAQWIEEQVANIKGYKTFSVLSAEQQKAFRYALFLQNDNEAYKKVVDWLRTDQSARVNGTQKYLAKKIQEKLTKMLPNKHLSFEFILADATEVSELRRQYARQNPLLAKAEKQAPSSHAIDAVMAFVARYQKVFKDGTPPNADEVAKLAMLDSWNPASNEPLTKGLSTNQKIEKMIKSGDYGQKNMREVFGKSIFGENAIGERYKPIVVQEGGYYIGYPATVKKGYELKNCKVVTSKNDIAKLEKIIKNQDLISLKENQYIKIFSINKQTISELSNRYFNMNYKNLVERDKEIVGLLEFIVENCRYYTKKVDVKFAPKYIHETKYPFYDDWRRFDEAWRYLQENQNKTSSKDRFVIDKSSLNEYYQPDKNEYKLDVDTQPIWDDFCRWYFLDRYKTANDKKSIRIKARKTFSLLAESGVQGKVFRAKRKIPTGYAYQALPMDNNVIAGDYANILLEANSKTLSLVPKSGISIEKQLDKKLDVIKKTDVRGLAIDNNSFFNADFDTHGIRLIVENTSVKVGNFPISAIDKSAKRMIFRALFEKEKGKRKKKTTISFKESGPVQDYLKVFLKKIVKIQLRTDGSISNIVVRKNAADFTLSFRSEHIQKLLK

SEQ ID NO: 203 - protein, 1629 aa, Francisella novicida
MNFKILPIAIDLGVKNTGVFSAFYQKGTSLERLDNKNGKVYELSKDSYTLLMNNRTARRHQRRGIDRKQLVKRLFKLIWTEQLNLEWDKDTQQAISFLFNRRGFSFITDGYSPEYLNIVPEQVKAILMDIFDDYNGEDDLDSYLKLATEQESKISEIYNKLMQKILEFKLMKLCTDIKDDKVSTKTLKEITSYEFELLADYLANYSESLKTQKFSYTDKQGNLKELSYYHHDKYNIQEFLKRHATINDRILDTLLTDDLDIWNFNFEKFDFDKNEEKLQNQEDKDHIQAHLHHFVFAVNKIKSEMASGGRHRSQYFQEITNVLDENNHQEGYLKNFCENLHNKKYSNLSVKNLVNLIGNLSNLELKPLRKYFNDKIHAKADHWDEQKFTETYCHWILGEWRVGVKDQDKKDGAKYSYKDLCNELKQKVTKAGLVDFLLELDPCRTIPPYLDNNNRKPPKCQSLILNPKFLDNQYPNWQQYLQELKKLQSIQNYLDSFETDLKVLKSSKDQPYFVEYKSSNQQIASGQRDYKDLDARILQFIFDRVKASDELLLNEIYFQAKKLKQKASSELEKLESSKKLDEVIANSQLSQILKSQHTNGIFEQGTFLHLVCKYYKQRQRARDSRLYIMPEYRYDKKLHKYNNTGRFDDDNQLLTYCNHKPRQKRYQLLNDLAGVLQVSPNFLKDKIGSDDDLFISKWLVEHIRGFKKACEDSLKIQKDNRGLLNHKINIARNTKGKCEKEIFNLICKIEGSEDKKGNYKHGLAYELGVLLFGEPNEASKPEFDRKIKKFNSIYSFAQIQQIAFAERKGNANTCAVCSADNAHRMQQIKITEPVEDNKDKIILSAKAQRLPAIPTRIVDGAVKKMATILAKNIVDDNWQNIKQVLSAKHQLHIPIITESNAFEFEPALADVKGKSLKDRRKKALERISPENIFKDKNNRIKEFAKGISAYSGANLTDGDFDGAKEELDHIIPRSHKKYGTLNDEANLICVTRGDNKNKGNRIFCLRDLADNYKLKQFETTDDLEIEKKIADTIWDANKKDFKFGNYRSFINLTPQEQKAFRHALFLADENPIKQAVIRAINNRNRTFVNGTQRYFAEVLANNIYLRAKKENLNTDKISFDYFGIPTIGNGRGIAEIRQLYEKVDSDIQAYAKGDKPQASYSHLIDAMLAFCIAADEHRNDGSIGLEIDKNYSLYPLDKNTGEVFTKDIFSQIKITDNEFSDKKLVRKKAIEGFNTHRQMTRDGIYAENYLPILIHKELNEVRKGYTWKNSEEIKIFKGKKYDIQQLNNLVYCLKFVDKPISIDIQISTLEELRNILTTNNIAATAEYYYINLKTQKLHEYYIENYNTALGYKKYSKEMEFLRSLAYRSERVKIKSIDDVKQVLDKDSNFIIGKITLPFKKEWQRLYREWQNTTIKDDYEFLKSFFNVKSITKLHKKVRKDFSLPISTNEGKFLVKRKTWDNNFIYQILNDSDSRADGTKPFIPAFDISKNEIVEAIIDSFTSKNIFWLPKNIELQKVDNKNIFAIDTSKWFEVETPSDLRDIGIATIQYKIDNNSRPKVRVKLDYVIDDDSKINYFMNHSLLKSRYPDKVLEILKQSTIIEFESSGFNKTIKEMLGMKLAGIYNETSNN

SEQ ID NO: 204 - DNA, 27 bp, Artificial Sequence
  Description of Artificial Sequence: Synthetic oligonucleotide
  modified_base (25)..(25): a, c, t, g, unknown or other
gataatctcttatagaattgaaagngg

SEQ ID NO: 205 - DNA, 27 bp, Artificial Sequence
  Description of Artificial Sequence: Synthetic oligonucleotide
  modified_base (25)..(25): a, c, t, g, unknown or other
gttaatcttctatagagttgaaagngg

SEQ ID NO: 206 - DNA, 33 bp, Artificial Sequence
  Description of Artificial Sequence: Synthetic oligonucleotide
  modified_base (31)..(31): a, c, t, g, unknown or other
gttaaaatcagaccaaaatgggattgaaatngg

SEQ ID NO: 207 - DNA, 32 bp, Artificial Sequence
  Description of Artificial Sequence: Synthetic oligonucleotide
  modified_base (30)..(30): a, c, t, g, unknown or other
gttttaactacttattatgaaatctaaatngg

SEQ ID NO: 208 - DNA, 35 bp, Artificial Sequence
  Description of Artificial Sequence: Synthetic oligonucleotide
gtctcacccttcatgggtgagtggattgaaatgaa

SEQ ID NO: 209 - DNA, 34 bp, Artificial Sequence
  Description of Artificial Sequence: Synthetic oligonucleotide
gtcgcgtcctcacgggcgcgtggattgaaacgaa

SEQ ID NO: 210 - DNA, 32 bp, Artificial Sequence
  Description of Artificial Sequence: Synthetic oligonucleotide
gwgttccccgcgccagcggggataaaccgctt

SEQ ID NO: 211 - DNA, 32 bp, Artificial Sequence
  Description of Artificial Sequence: Synthetic oligonucleotide
gtgttccccacatgcgtggggatgaaccgctt

SEQ ID NO: 212 - DNA, 32 bp, Artificial Sequence
  Description of Artificial Sequence: Synthetic oligonucleotide
gwgttccccgcgccagcggggataaaccgcat

SEQ ID NO: 213 - DNA, 32 bp, Artificial Sequence
  Description of Artificial Sequence: Synthetic oligonucleotide
gwgttccccgcgccagcggggataaaccgcct

SEQ ID NO: 214 - DNA, 32 bp, Artificial Sequence
  Description of Artificial Sequence: Synthetic oligonucleotide
gwgttccccgcgccagcggggataaaccgctc

SEQ ID NO: 215 - DNA, 30 bp, Artificial Sequence
  Description of Artificial Sequence: Synthetic oligonucleotide
gttcactgccgtgtaggcagctaagaaagg

SEQ ID NO: 216 - DNA, 30 bp, Artificial Sequence
  Description of Artificial Sequence: Synthetic oligonucleotide
gttcaccgccgcacaggcggcttagaaagg

SEQ ID NO: 217 - DNA, 43 bp, Artificial Sequence
  Description of Artificial Sequence: Synthetic oligonucleotide
  modified_base (6)..(7): a, c, t, g, unknown or other
wttctnngtttttgtactctcaagatttaagtaactgtacaac

SEQ ID NO: 218 - DNA, 44 bp, Artificial Sequence
  Description of Artificial Sequence: Synthetic oligonucleotide
  modified_base (6)..(8): a, c, t, g, unknown or other
tttyrnnngtttttgtactctcaagatttaagtaactgtacaac

SEQ ID NO: 219 - DNA, 41 bp, Artificial Sequence
  Description of Artificial Sequence: Synthetic oligonucleotide
  modified_base (2)..(2): a, c, t, g, unknown or other
  modified_base (5)..(5): a, c, t, g, unknown or other
cnccngttttagagctgtgttgtttcgaatggttccaaaac

SEQ ID NO: 220 - DNA, 39 bp, Artificial Sequence
  Description of Artificial Sequence: Synthetic oligonucleotide
  modified_base (3)..(3): a, c, t, g, unknown or other
ccngttttagagctatgctgttttgaatggtcccaaaac

SEQ ID NO: 221 - DNA, 39 bp, Artificial Sequence
  Description of Artificial Sequence: Synthetic oligonucleotide
  modified_base (3)..(3): a, c, t, g, unknown or other
ccngttttagagctatgttattttgaatgctaccaaaac

1. A composition comprising an AAV particle comprising a polynucleotide encoding at least one payload and at least one CRISPR regulatable element.

2. The composition of claim 1, wherein the serotype of the AAV particle is selected from AAV1, AAV2, AAV2G9, AAV3, AAV3a, AAV3b, AAV3-3, AAV4, AAV4-4, AAV5, AAV6, AAV6.1, AAV6.2, AAV6.1.2, AAV7, AAV7.2, AAV8, AAV9, AAV9.11, AAV9.13, AAV9.16, AAV9.24, AAV9.45, AAV9.47, AAV9.61, AAV9.68, AAV9.84, AAV9.9, AAV10, AAV11, AAV12, AAV16.3, AAV24.1, AAV27.3, AAV42.12, AAV42-1b, AAV42-2, AAV42-3a, AAV42-3b, AAV42-4, AAV42-5a, AAV42-5b, AAV42-6b, AAV42-8, AAV42-10, AAV42-11, AAV42-12, AAV42-13, AAV42-15, AAV42-aa, AAV43-1, AAV43-12, AAV43-20, AAV43-21, AAV43-23, AAV43-25, AAV43-5, AAV44.1, AAV44.2, AAV44.5, AAV223.1, AAV223.2, AAV223.4, AAV223.5, AAV223.6, AAV223.7, AAV1-7/rh.48, AAV1-8/rh.49, AAV2-15/rh.62, AAV2-3/rh.61, AAV2-4/rh.50, AAV2-5/rh.51, AAV3.1/hu.6, AAV3.1/hu.9, AAV3-9/rh.52, AAV3-11/rh.53, AAV4-8/rh.64, AAV4-9/rh.54, AAV4-19/rh.55, AAV5-3/rh.57, AAV5-22/rh.58, AAV7.3/hu.7, AAV16.8/hu.10, AAV16.12/hu.11, AAV29.3/bb.1, AAV29.5/bb.2, AAV106.1/hu.37, AAV114.3/hu.40, AAV127.2/hu.41, AAV127.5/hu.42, AAV128.3/hu.44, AAV130.4/hu.48, AAV145.1/hu.53, AAV145.5/hu.54, AAV145.6/hu.55, AAV161.10/hu.60, AAV161.6/hu.61, AAV33.12/hu.17, AAV33.4/hu.15, AAV33.8/hu.16, AAV52/hu.19, AAV52.1/hu.20, AAV58.2/hu.25, AAVA3.3, AAVA3.4, AAVA3.5, AAVA3.7, AAVC1, AAVC2, AAVC5, AAV-DJ, AAV-DJ8, AAVF3, AAVF5, AAVH2, AAVH6, AAVLK03, AAVH-1/hu.1, AAVH-5/hu.3, AAVLG-10/rh.40, AAVLG-4/rh.38, AAVLG-9/hu.39, AAVN721-8/rh.43, AAVCh.5, AAVCh.5R1, AAVcy.2, AAVcy.3, AAVcy.4, AAVcy.5, AAVCy.5R1, AAVCy.5R2, AAVCy.5R3, AAVCy.5R4, AAVcy.6, AAVhu.1, AAVhu.2, AAVhu.3, AAVhu.4, AAVhu.5, AAVhu.6, AAVhu.7, AAVhu.9, AAVhu.10, AAVhu.11, AAVhu.13, AAVhu.15, AAVhu.16, AAVhu.17, AAVhu.18, AAVhu.20, AAVhu.21, AAVhu.22, AAVhu.23.2, AAVhu.24, AAVhu.25, AAVhu.27, AAVhu.28, AAVhu.29, AAVhu.29R, AAVhu.31, AAVhu.32, AAVhu.34, AAVhu.35, AAVhu.37, AAVhu.39, AAVhu.40, AAVhu.41, AAVhu.42, AAVhu.43, AAVhu.44, AAVhu.44R1, AAVhu.44R2, AAVhu.44R3, AAVhu.45, AAVhu.46, AAVhu.47, AAVhu.48, AAVhu.48R1, AAVhu.48R2, AAVhu.48R3, AAVhu.49, AAVhu.51, AAVhu.52, AAVhu.54, AAVhu.55, AAVhu.56, AAVhu.57, AAVhu.58, AAVhu.60, AAVhu.61, AAVhu.63, AAVhu.64, AAVhu.66, AAVhu.67, AAVhu.14/9, AAVhu.t 19, AAVrh.2, AAVrh.2R, AAVrh.8, AAVrh.8R, AAVrh.10, AAVrh.12, AAVrh.13, AAVrh.13R, AAVrh.14, AAVrh.17, AAVrh.18, AAVrh.19, AAVrh.20, AAVrh.21, AAVrh.22, AAVrh.23, AAVrh.24, AAVrh.25, AAVrh.31, AAVrh.32, AAVrh.33, AAVrh.34, AAVrh.35, AAVrh.36, AAVrh.37, AAVrh.37R2, AAVrh.38, AAVrh.39, AAVrh.40, AAVrh.46, AAVrh.48, AAVrh.48.1, AAVrh.48.1.2, AAVrh.48.2, AAVrh.49, AAVrh.51, AAVrh.52, AAVrh.53, AAVrh.54, AAVrh.56, AAVrh.57, AAVrh.58, AAVrh.61, AAVrh.64, AAVrh.64R1, AAVrh.64R2, AAVrh.67, AAVrh.73, and/or AAVrh.74.

3. The composition of claim 2, wherein at least one payload comprises a dsRNA, siRNA, miRNA or engineered precursor thereof.

4. The composition of claim 2, wherein at least one payload comprises a wild type mRNA.

5. The composition of claim 2, wherein at least one CRISPR regulatable element comprises a cas9 nuclease.

6. The composition of claim 5, wherein the AAV particle further encodes an sgRNA.

7. The composition of claim 6, wherein the sgRNA is located upstream (5′) of the cas9 nuclease.

8. The composition of claim 6, wherein the sgRNA is located downstream (3′) of the cas9 nuclease.

9. A method of synthesizing a CRISPR-AAV particle comprising
a. introducing into competent bacterial cells
i. a payload construct vector comprising a payload and one or more CRISPR regulatable elements flanked on each side by a parvoviral ITR sequence to produce a payload construct expression vector; and
ii. one or more viral construct vector(s) comprising parvoviral rep and/or cap gene sequences under the control of one or more regulatory elements to produce a viral construct expression vector;
b. introducing into viral replication cells
i. the payload construct expression vector produced in step (a.i) to produce a payload construct particle; and
ii. the viral construct expression vector(s) produced in step (a.ii) to produce a viral construct particle; and
c. co-infecting a viral replication cell with the payload construct viral particle produced in step (b.i) and the one or more viral construct viral particle(s) of step (b.ii) to produce a CRISPR-AAV particle.

10. A CRISPR-AAV particle comprising an AAV polynucleotide, said AAV polynucleotide comprising:
(a) at least one payload; and
(b) at least one CRISPR regulatable element.

11. The particle of claim 10, wherein the serotype of the AAV particle is selected from AAV1, AAV2, AAV3, AAV4, AAV5, AAV6, AAV7, AAV8, AAV9, AAV9.47, AAV9(hu14), AAV10, AAV11, AAV12, AAVrh8, AAVrh10, AAV-DJ8 and AAV-DJ.

12. The particle of claim 11, wherein at least one payload comprises a dsRNA, siRNA, miRNA or engineered precursor thereof.

13. The particle of claim 11, wherein at least one payload comprises a wild type mRNA.

14. The particle of claim 11, wherein at least one CRISPR regulatable element comprises a cas9 nuclease.

15. The particle of claim 14, wherein the AAV particle further encodes an sgRNA.

16. The particle of claim 15, wherein the sgRNA is located upstream (5′) of the cas9 nuclease.

17. The particle of claim 15, wherein the sgRNA is located downstream (3′) of the cas9 nuclease.

18. A method of treating a CNS disorder in a subject in need thereof, the method comprising administering to the subject a therapeutically effective amount of a CRISPR-AAV particle comprising an AAV polynucleotide, said AAV polynucleotide comprising:
(a) at least one payload; and
(b) at least one CRISPR regulatable element.

19. The method of claim 18, wherein the CNS disorder is Parkinson's disease.

20. The method of claim 18, wherein the CNS disorder is Friedreich's Ataxia.

21. The method of claim 18, wherein the CNS disorder is Amyotrophic lateral sclerosis (ALS).

22. The method of claim 18, wherein the CNS disorder is Huntington's disease.

23. The method of claim 18, wherein the CNS disorder is spinal muscular atrophy (SMA).

24. A method of regulating the expression of a protein of interest, said method comprising contacting a subject with a CRISPR-AAV particle comprising an AAV polynucleotide comprising:
(a) at least one payload; and
(b) at least one CRISPR regulatable element.

25. The method of claim 24, wherein the at least one CRISPR regulatable element is a DNA binding domain coupled with a transactivation domain.

26. The method of claim 25, wherein the at least one CRISPR regulatable element is located in the VP2 capsid.

27. The method of claim 25, wherein the expression of the protein of interest is increased for at least 2 hours.

28. The method of claim 25, wherein the expression of the protein of interest is increased for at least 6 hours.

29. The method of claim 24, wherein the at least one CRISPR regulatable element is a cas9 endonuclease fused to a destabilizing domain.

30. The method of claim 29, wherein the destabilizing domain is a destabilizing domain from a protein family selected from the group consisting of FK506 Binding Protein (FKBP), E. coli dihyrofolate reductase (DHFR), mouse ornithine decarboxylase (MODC), and estrogen receptors (ER).

31. The method of claim 30, wherein the destabilizing domain is from the estrogen receptor protein family.
